United States Patent Application Publication US 2021/0254182 A1 - sequence listing, part 7

SEQ ID NO: 92 - DNA, 6830280 bp, Phytopthora sojae (residues 3,415,141-5,122,710 of 6,830,280)
  misc_feature (116850)..(116949): n is a, c, g, or t
  misc_feature (449913)..(450012): n is a, c, g, or t
  misc_feature (684235)..(684398): n is a, c, g, or t
  misc_feature (689322)..(692253): n is a, c, g, or t
  misc_feature (695709)..(695808): n is a, c, g, or t
  misc_feature (704383)..(767052): n is a, c, g, or t
  misc_feature (1090814)..(1100813): n is a, c, g, or t
  misc_feature (1526343)..(1526442): n is a, c, g, or t
  misc_feature (1531123)..(1531743): n is a, c, g, or t
  misc_feature (1538912)..(1547265): n is a, c, g, or t
  misc_feature (1558805)..(1569699): n is a, c, g, or t
  misc_feature (1846672)..(1846771): n is a, c, g, or t
  misc_feature (2060558)..(2064921): n is a, c, g, or t
  misc_feature (2067168)..(2105998): n is a, c, g, or t
  misc_feature (2120976)..(2144287): n is a, c, g, or t
  misc_feature (2152081)..(2153418): n is a, c, g, or t
  misc_feature (2166625)..(2166724): n is a, c, g, or t
  misc_feature (2169618)..(2181259): n is a, c, g, or t
  misc_feature (2189220)..(2189319): n is a, c, g, or t
  misc_feature (2195851)..(2196581): n is a, c, g, or t
  misc_feature (2198717)..(2209061): n is a, c, g, or t
  misc_feature (2211746)..(2249613): n is a, c, g, or t
  misc_feature (2253993)..(2259139): n is a, c, g, or t
  misc_feature (2286108)..(2286207): n is a, c, g, or t
  misc_feature (2293004)..(2293004): n is a, c, g, or t
  misc_feature (2294764)..(2297229): n is a, c, g, or t
  misc_feature (3010972)..(3011071): n is a, c, g, or t
  misc_feature (3016492)..(3016682): n is a, c, g, or t
  misc_feature (3021422)..(3021885): n is a, c, g, or t
  misc_feature (3198681)..(3198780): n is a, c, g, or t
  misc_feature (3358360)..(3364844): n is a, c, g, or t
  misc_feature (3368464)..(3379166): n is a, c, g, or t
  misc_feature (3391216)..(3391315): n is a, c, g, or t
  misc_feature (5160212)..(5160311): n is a, c, g, or t
  misc_feature (5601576)..(5601675): n is a, c, g, or t
  misc_feature (5606896)..(5617696): n is a, c, g, or t
  misc_feature (5623782)..(5642643): n is a, c, g, or t
  misc_feature (5652685)..(5652798): n is a, c, g, or t
  misc_feature (5661179)..(5662574): n is a, c, g, or t
  misc_feature (5897897)..(5897996): n is a, c, g, or t
  misc_feature (6065830)..(6065929): n is a, c, g, or t
  misc_feature (6093671)..(6096991): n is a, c, g, or t
  misc_feature (6116449)..(6117808): n is a, c, g, or t
  misc_feature (6137192)..(6148306): n is a, c, g, or t
  misc_feature (6160785)..(6161254): n is a, c, g, or t
  misc_feature (6186004)..(6186103): n is a, c, g, or t
  misc_feature (6191492)..(6192578): n is a, c, g, or t
  misc_feature (6236919)..(6242523): n is a, c, g, or t
  misc_feature (6247395)..(6257394): n is a, c, g, or t
  misc_feature (6258996)..(6265732): n is a, c, g, or t
  misc_feature (6267174)..(6267508): n is a, c, g, or t
  misc_feature (6272215)..(6366464): n is a, c, g, or t
  misc_feature (6367167)..(6367492): n is a, c, g, or t
  misc_feature (6371823)..(6372269): n is a, c, g, or t
  misc_feature (6380696)..(6380953): n is a, c, g, or t
  misc_feature (6386254)..(6390992): n is a, c, g, or t
  misc_feature (6391939)..(6393915): n is a, c, g, or t
  misc_feature (6657526)..(6657625): n is a, c, g, or t
cttttgtcacagcgaagtcggtgatcgaagctcgagatggataggcgctttgcagctacgcgcgccgtctgacggactcccgccattttgaagggcaatgattgactttcctctacatgtacacgtgccagctaacatgcatgcatatgacgagtgagcattgtcgggatcaactattaatactgcactggtaaatggatacgataagcacggagcaccaagccgataaagtgcccttgaagttgccgtttacaccgaaatggacttttggccaatggctttctgtcgaacatttcggccaatcaaaaatcagttttagtggttcgtacagatcacaatcaaacgacggttttacaatcgaacgcactttccactcataaactatacgctatacttttactcgtacaaaagcaaagtttgtgcgcggtaccactgctttcttttgtgtcgtcgctccgtagaggtgcttgcaaatgcgtgcaatgcttgcaaaccttgcatggagcgtaggggccagcactgggggcacgaacgcaagggtcacacgcacaaggcgaagagagtctcggagagggccagtgtgcatgctaatctagtgttcgtccgccctcgcggtcaagcaagcggcctttcgagacggaattcggcgacgattatttcatcacacttgtttgagccgataccgccatctgcacgccacggcaccatttggctgggtatcacaccgaagtcggctggtgttgcggcaaccaggctgtcaccggctgcctgcctgccgggcgggtccgcggagactctcacttgaccctctgtgggggaccgccaagtttcgtgacgatactgtaatgcctctcacttgtttctgccccagaggtacggacggcgatacgcatcacctcgtagcgaaagccgctggctcgttgaatcgactgccagaagcgtgcacagcggggcatgctgggccctttccgagccatttctgattggccgaaatagcgtcttgcgcgagccacaatttcccccattcgcgtgcctctttgcgcgcgcagagagcgggcgtaacagggggaaggtcgcagcgagcccaagcaactggagctcgcagccagtgcggacgaccgacgagcgagcactggcactcctgcgctgcaagggcggaaggcacaaccagcagcagctccgtgtgctcccccaccacttccaccaccaccctccaccctcctcagcgagagcgagagagctatcttcgtccggcagttcaggcaggtgcgtctcctcactcaagagcgatcgatcgatcgatcggtcgcccgcccgcccgctcgtcctttaaccgacgaccgcattgtgcgtgcagatcgatagacagacagacagatagatgagcggcgacatcccgggctcccccgagtacccgcgcgcgcccaccgtggcctcgcaatggcccgccgacgtggacctggacgcgctgtacctgtcggagcgcgccgaggtggacgagctcgtgcgcagcgcgtccgacatgagcgtctgggccgtagagaaccgcaaggacaacgccatggtctacctgcactccaagaacagcgagcgcctgtcctactcggtgcgcgccgtgaccaaggtcaccggctccgtgtcggacgtgctcgagtgcctccgctccgcggacaacgcgagcctgagaggcttccagaagctgctgcacccgcgcaacttcctggacggcgaggtgctgcacgcgcaccacacggacccggcctctacgcacgacggcgcgtcggtcgagtccatgacgctcaagtggctcgtgtactcgtcgcccaagaccctgggccgctccaaggagttctgcatccgcgagtactgtgtgctgctgcctaaccaccccgtgcacggcaacgtgggcgtgttgaagttcgagtcgtatgacggcgcagctgcgcagtatggtattcgtggcaagcccgacgcctacagcttgacggtgttcgagcccagctccttcgtggtgcagcagacccccgaggaccccaacatggtcaacgtcatgtggacgttcgcaatgcggaaagcgcgaggaggcgagagcgtttcggccggcgttcgcctcacctcgctccgactggctggcgatctgtccggcatgcagaaggcggtgcagcaggctttgtttgctccggcagcgttggcgcaacgtcaggaatgggtgaacgacgcgcagcgaaccaactgctcgctctgtgtgcaatctttcagcatgttgaagcgacgtcatcactgccgcgtgtgcggcgaggtggtctgctccgcgtgtaccgtgtttaaaatggtcaagggagatcaggaagtggcggccaaagtgcgagtgtgcaaggcctgtttggcgaagagtgccagctcgaacggcatcgtcacgaacgcgttcgcgaaccagaactttggcagcaccatggccccaggatacgcgaacccgcccgctcggatgctcagtagcaatggcaccgagttggaggtgaatagcggactgggaaacatgccacctcctaatggcgtgggtatcggcacgagcgtcggcagtaccagttcactgacctcggatgagtcacacagcccgcccaacgacaaccccgcgtcggcgtctcctccgacgatgatggccaacaacaagagtttgtccctgaacgactttgaatcggcgtcacagatgagtgacgatggaagtagcagccccccgtcctaccacaagcaaacctcctctgtgtcaagtcaaggcagagggacgggctacgaaggtaggccgattggttccatgggtagaaccgcgtccaatgctagcattgcaaccagcaggaaaaagagctccgatcgccgtatccattatttcaacgaggacatggaggagatctgcatgctggcgatggagacgttgacttgccccatggcaggtattcgcaccgaagatttcgagctcgtgaggtactatgacggcaagccggggccgggcctacctcgaagtctgccgaccttccgacgactggcgactcgcggcaagccgtgcatcgtgctcgatgtgagctcggacaagcggatttcgggcgaaaagcgtttcacagccaagctgcagttcttcgtgggtattccgttgctcgttaacggtgaagtggttggcgatttgtgcgttgcggaccgctacgcccgtgacaacatcgaccacaagcaggtggaggtgctcaacgtgttgggcgagactgtgactcagtatatgcaatcggacgagtatcaggaggaccttatggagttcaaggccacacacttggcgcgcaggccccctacgagtggctctgtatcccagccagcagatgatgaagccccgccacgaagcaccaaggaagttgcgttttaaagtataacggcacggtgaagctggaaaacgtggacgctttggtcagtgggtgggatggtggtgtgctcagccactcgcagtgtatatgtgagcctgtctggcaggaggatgtggtgtgtacgcgcgtctacctgggctgcctcctgccgctttgtgtaccgcttaagcggggtacgtgaaaattgttgaggggagcattatagattccttggtagctggctgtgtgaattcattgctgccccaaagtgattaaatattttccggttttgcctagtttggtggtctcctttctgcgccagtgcgttcgtttggtttggattggttcatgttcgggctgacaagctgccgcctccatgtcgtccaggccgaggccttcgtgcatcaagcggtggtgacggagatcgtgatcgagaccgcagtcgcgtcagcattcccgtcgttgcgtcttgctgcttcccttcgtcgtcattgttccagcagtacggccaggtatcgcgaatatgctggagctcttcctggatagtgcgggttttgcgctgtgtgagctgacgacgttgttgctcagcctcttcttgacgccgtgaaacatgggacgaacgtgtgatggaggttactgcctgcggcaccgctcgctttcccgatggagtcgtctgcagatacaaaacaagaaggagttaggctggggaaggtcaactttcctggtcgtactcaccattggacgctgagggagtcgcaaagctcgactttttcccgcttcctgcaactgcttcgtgaccagctgcattccaagacgaacaggactcgggggctcactgacatcttcgcgatctacctcacgcagtgatggaagatcagtttgactcgccattgacgccattgttggctttctggttaacgttctgggagcgtcaggggccgagccgttcgaaggagatggtgtcgcgacactgatgcggtgtttgcttgcggtgcgacctcgctccttctgctcgcgcttcttctgcttctcctccagcatgtagtacaatgggagctccatgcaaagttggtcccctgcaacatgtgtacgtctcccgcagatcaaacaacagtttccactgagtcgcatgagtttgcgcgtaatggggatcctcaggttcgggtactgtagtgcttgtaagattcgcgtttctcgccaagcttctcgcgcttcagcaatagagcgcaaacgtcttcgagttggaactacgtgaggcttcagctctttcccgccaaaatgcaacatgaataacttcctctgcaaaacaacaataacaaaatatgagtaaactgcctaggtctgttcaaaatataagccctaccgtgagcatgaggcagtccacatcagtcgtggcgcgaatatccacaggacacaatgataccttcttctccgacgccaggtattcaccagcaacgtcaaatttacccaaaaacgtcagctcgacagtgatactgcgctgtacaccgcgagcttcgcccatactgcatccaattcgaggtgagacttcgcaaaataaagaagtaaggaaaatgcgcatacgtatgcagacttacctcatttcggaactctcattaactgttagattaacgctctccacggcttcgccccttaagaaaacgaagaaggagtcggcctcagagcctttgcgcgtcaagtattgctgcagcgttggcaaatttagttcaaatgttgtatcgtgaataaaaaatcggttgcgacgtaccccagcggagacattgaccagtttcatagagtttacaatatgcatgagttctgaagacgaaacgacaagtgtgagataaagacacaatgcaagtcgaacgccaaactaagtcgtacgcatcttcgtccagctcttaaagataagcaagtgctgcaagaaggcgatattgtccgtgatagttccctagatacggttcaggggcatggtcaaaagtcaactacgagatcagcgtacttattgatagctatgttgcaactcacctcgatagtttggctgcgagtcattcgcagataggatgcagctgtgagaacgataaaattcgccatttgagcctgcggatcgacgatcacagttgcgctacgcttggaatcaggctcaataaggcagagctctccgaacgtcgcgcctggcgtgagcgtcaccaccttggtcccgtagttaatgctcgctgttcctgactacagcatcctgagtgaatcagtcgcgaaatatgttgcgagctagacactgaaaacttacaagtctgcgcatgctggaggagacagagctcgagcggaggatgcgctggtatctgatctgctcgtcgggactgcggacatacaccgacacgacgccgctcataaggatctacaataaaaaatccgccagtgatcagcaaaaatacgaccgagaaaaacattttgctggttcagctacacgtacgaagcacgtgctgcccttttcgccttgattcacgaccacttggccgctgttgagatggaggaattccatgtccttgcacagcttcttagcagatacttccgacatggttgtaaacagcgagctaagtttttcctggttcatgagccactgatacagcatcttcacgtgtgcaagaggtcaatacattcttggtcaaggaaataaaattgtgaaatagggaactggcatcaataaatcgagtaaacaaaacaagtggaaaggatatcactctcagagcggtcttcaggtggtttcttcagcatcctgtaagcgcagggggcatcctgtcaatactcacaacgttcgcaaatctcccattgcgacaacgtactcgatgatgtgctggaccttggcgcttactgtcataagggccgggctgggtagaatctcgcgacgcagcgcactccacttgttcgaccttgttgacacaggagtctttggcaccagctgctgctccttgttgctctcgccctcaatttcaggggacggagacgtcttctcattgttggcactccaggcggggggagtgccggacgttgggcttgcagctggccccacacgccgataaatgcgcgtcagtctcgatgctttcccctccaaagcacctgctgctactgcagaggcattagaagatctcggcgagttcgacgaggctggggctactgcaggcagcgcagccattatatatgcgagggactgaagggggagacgctggcagtggacggagggggactacaatgctagacgcagcgactgcactatttttggaagtgtacgttgaagtttcctgatatctgtagacgaaaagtgtagccatttgtagaacatcgctacaaattttgtgttagcgcaaggtgccgtctatttgcattaccgtaagctaaaccacgttgaggtgatcacatctgtatgagctccaaactttctctactttttactagccttgaccagcttgtacgactcgagtcgggaagtcggcagaccggtggatgcgaacgcgttcttttcggcaccgcccttcttcttcttactacgacgcttcttcttcttctcgggttcgtctgaggccttctccgcagccggctcggccttgtctttcttcgccttcttgctcttaggctcggagacttcctccgagtccgcctcgggcattgcctcgtcctcctctggcttcgattcctcctcaaccgccttcttctttttgttgcgcttccgcttcttcttcggctgctcggcctcaccgttctgtgcctcacccgtctctgcagcctccttgttcttacgtctacggttctcctcctgagcttcgcgcacgctcttcttgaagttcttaagccgcttgcggtccacagcgaactccgtctcagcatacggtgccatacgcttgagagacacaagctgcttgagctccttgtcgtcggcagccattatctcatccaccgtcaagccgaagtcgttgttctccacctggcggtatttgaagcggcacttgatatcgccgattaggtcttcgtagtcaaggctgtacagctcgtccaggtacttctgcttttcacgctgcatctcctccatcgtcatcttcttgggcggctcctgttcctcctcatcgcctttttcctcctgctcctgctcctcctcctcgttttcttctgcctcgcccttctcgctagtctcagcggcggcctctgtcgcctctccctcctcttcatcttccggatcaacaggcagaccagcaaacagctccttgtcttcctcctcgtcccatgtaggcttctccatatcgtcgtcgtcctcgtcgtagtactgctcatcaaagacagcctgcatccgcttgtcgtactcttcggggtcgaagtcaccctccaagtcctccggcttcagaccggccgtgccctctgcctcgcccatgagccgcgccaccttcttaagcttctgctcgatttcggcctgcttgaggttcttcagacgacgcagttcctcctccttcttctgacgctcgagggccttgcgctccttacgctcggcacgtttgcgcttacgggagtcgtcctcgcgacgcatcgtgtcctcaatgtgacgcgcgtgcgtctggataatgctgcttccctgctcctcaaagcgaaagttgtacgtgtgttcaaagtcctcggccttctcaagctcctcggcgtcctcttcgtcctccttgacgatgtcctcatagtgggggacgactgccgtcttgtccttccagccttcactgctcaggtagtgctccaggaacttgtccgggtccatgtcgtccttcttgagcttggagccgtacttggtggtgaactcctcgtactcctcgtcctcctgcttctgctctccttccgtcttcttcctcaccgtgaacagtcctccgtccaggtcgtctccgtcttcgtcctcctcctcgtcgctgctgccttccttctccatcagcgacttaaggaaatccttcttgatctgcgcctgctcctcggcgtacgtctgcacgggcttgcgctcgtcctcgtcttcgctgccgctgacgtcgcccgcgatcacctgctgacgcaccaaatccttgtagtacagcggggccgagcccttcttcttcttgcccttcttgtcgctgtcgtcgtcgctgtcgctgtcgctctccggcttcttgaagaaggcgatggacgagtcgtagatggccgggtccttcttgcggatgagcttcagcgtcttggagatgtccgcgtccagctccttcgtgagctcctcgccgtcctcgtcctccgtctccgagtccgactcgtcgtcgtcatcgtcggggttcagtccgcgcttctcgagcgccgagagctcctccttgcgcttgcgctcctcgaaggccgcggcgaacttctggttcaccttgagctggacctccgggctgctgggcggcgtcgggcgcgcggccttagacgagcccttggtcaccagcagatcatcgttgtcgtcgtgctgctgcgctgcggccttggagcccttgcgagatcggctggagcccatggtgcgcgacgattgacacactgaagtggctgaagcaagtggatggccgcggctggaagagagtgacacagtggagtttcgtgtaagtacgataccgaacaggataccgcgacgtttcgagggggtattcggttaggtgcgagtcccgcgtgggacctttcggtggagctgctggactgttactgttttcttcttgttgtagagctacaggagagcccccccccctgaagcattgggcaccgattccttgctgttgttgaagtctgtgctgtggacgagaacaaagcgttggcttggttgaccaatcgcacctgaaagatgcgttttgagacggcagttgagggggaggatggggccgaggcggattgtcgatccctctttaaaaatggcggcggcacaatggtgctcgcatagcttaagctcaaattgaaagcacgcagcagggcgaaacctacatcttcggcgcacacgtaggagaattaaatgtttcgcgtctttaatttcatgtttggatcgagccgttcgattaaggctgacatcgcggaaagacggataccgattttgatccatacagaagcgattgattgcaagtgcggcggttcacattgcgcgcatgaagggagatctgtcggcagcgccagcttcgccggggaaggatcaccctgatccttctccaatggagcccacttcaacacgagcacgcccttctaagtgcgaccttgatcgatcgaacacgggctagggaggaggagagacctgcgaaaatgttctcgattttgcatactgaaagcgagtctgttcggcgggtggtcaaaactggtggtggaggacgctcgccgcgcataacagcatgctgtctcgccgcatgtattcacgcaatcggaagcggtttgcaatccgagtgcggcggcgaattcgagaaaagcgaagttcggatatgtagacgcctctcaaaaaaactagggactgcgaggcaaattttttccctcaaaaagatggttccgatgcggccttgcgctggatcctaaaggggcgctgctcaatgagttcgtgcagtcggctccgcgcactgcctggtgtcccaagttcttcgtgccggatttgccgcaaagaagcagcagggctgtgggagaaatacagcactgttccctgcgcaaagaaaacctcgtttctaagccgctatcttacgagatatcaaatgtagaaatagctgacttcaccagtaaacaagttacgatcacaaactgcggtaatacggttttgaagggtataatgcttcccatgttccctattcggccacgtgcactgtactgcgcccgaccttgggctcgctgccaaccaactcgcgggggcatatcgtttgccccctctctatgtctattgcataagccaaaaaaggcctcgagcaggaggaggaacgccttcctgcgccagactcgacccgcccactcgccccgccgtcgccgcccggcttcgcatagagaagaaggaacaaaggcgtgtccagtcaccggcgactcgagggaaggaccggtaataccatcccacacctcggatactgtaccgccccgttgaggagcagcagccagccagccatcacagtgcaaaccggcggacggagaacagcggcaggcaggcaggcaggcaacagtgcagtgtgaagcgactcgcccctccccgactcagactcagcagcgaccgcgcagggctccgatggccatgatgctggacgacacggccgactcgaacgacgagcgcggccgcgccatcgtgcagacgctggcggtcgtcgtcgagtccatggtgcacgccagcgaccgcatgccgctgggctactaccacaagaccaagttcgaggccttccgcgcgccgggcatctcggtgcgcgactacctcacgcgcatccacaagtacgcgagctgcagccccgagtgcttcgtgctcgcgctcgtgtacatggaccgcctgcaccagatgcagggcttcgtgctcacggagctcaacgtgcaccgcgtggtcatcacgagcgtcgtgctggccgccaagttcttcgacgaccactacttcaacaacgcctactacgccaaggtgggcggcgtgccctgtcccgagatgaacgagctcgaggtcgagtacctgctgctcatcaactttagcctccacgtgagcagcgagacgtacgcgcgctactacaacgagctggccaaccactacatgtacacgcgcgtgcgcaactcgtcgctgccgcactcgccgtactaccagctgcgccacttcgtcgcgcccgaccagcagcacgaggggcagctcgtgtacgtgaccgagagctacccgaaggtgccgccgccgcaggagcatcggcgcagccaaccgctgccgctgcatcatcaccaccagtcacagccaatgatggcccccatgcgccggacagtagaagacggcgagaacggcgcggtgccggctgcagcaggctcctcaacagggaacaacggcaatggcatcgcctgcacaaagtcaagtcgggcctccgggcagaagaggaggagcgccgtcgcgctcggggtgaacgcgtaacatacttttccaagcggctgcttggttgtaagagaggcggaggcacccctggagcgacaccacacagaaacaccataattttgacggcgcgcgagccgggagcaggagctggacagccgacgaggcttgggagaaggatcacccagccttggttgagcgacaagtgtacgaccgatcgttgcagcaatctctaggcgcgctgagatgcggtacccccagtccaaaggtagcaggtgtgccgcgcaaactcgcgcgcctctgcgcggattggtcatacagctcccgtgcgcgccatcctgctcttcccggtcgcttccgtccccccattcgcctctcctttaaaatatagccacctggctgtgggtcagtcagtcgatagtcttccgatagtattagctgctagtcaaagtcacccaggttgcttccgcttgcacgccctcggtgcgagtgcctttgtaatctagactcgggttctttgaaatatcactgttcaaaatggcaacaagctcgtaggtttatgcttcaacttcctcctcaccagctatcaacctacttgcgcctccagaaggtgccgtcagacacaccccactggtacttgcgctcgtgctcgcggatcatgaacgggtagtcctggcgctcgacaagctcaaagtccgccgacagcaacttttcaatcacgctgaagctgtccacaggctttccctcgccgtcgcgaacgccgccaatccacttgtccttggccgtgtactcctccagccacgagtacgggctcacgagagcaaggatgcccccggagttgatacatccgccgatctccgtcaaaaacttctgcggttccggcaggcgacacagcaagttggaggcgaacaccgcgtcgaatttacctgcaacatcgcaattatcacacacaagttttcgtgagcaaccacgcgctagcctctccacgaggttatatgttccaccacgtacctagcgacggcgacaggttgcacgcatctccctgctggaagacaacgccagcgggcttggcgccctcaggcagcttcgcgctacgcacctcgtggatgtctccctggatgtgcgcctcgtactgcatctctccgcgctccttcatctgctcggccgcatccacaaagtgctgcgagaagtcaatgcctacggtctgcatacgcaacaacagcgcaacatcataccaaatgagttagtgcgtttaaaccgcagcagggaacagcgcctcgctccgccgcgcacctcgtcgtagaacttgctgagctcgaaggtggcgcgacccacagcgcagccgatgtccagtgcacgtccgtgttgtccatccggcgtcatcttggcgcagcgctccacagtgcgtggcagaaactgcagcgcgtccagtggcgcgaagctgtagggcacaacagcggaggggtcacctggcacaaacaatgcataattaggacacatgacacaccaggaaatatcggtgccgcagcccaacttaccgtagtggaactgcaggtactcgtgcacggcgcgctcggactcgtagacggccgagccgctggctgtggtgctgcgaacggcgggggccatgctggtcaagaacggaagtgtccaattcagatcggcggatctcagattctgagctgactgatccgttgttggatacgggacggatgtcccgtaaaacgaattgtattcgtatcgatcagggtattatagtagtgggaactttggtatgaaactacagtactatcacccaatgaatgaatgatacctgcgcttgactcaacttgtatgcgagctcagagctggtgtccatacgtgatgtatgagctaccaccgtgtaggctcgttgtttgttctcgtttgagaatttcttaggaaagaaccggttttagaacacactcgcctgcgagcagcgttcaagaacgaataagctttcgccgacctccgcgaaccaacggcacacacgagagcgttgggtaggctgggatagctaagaaacgttgggtgaggggactgcggtacagtggatttgtgtcttattcggcgaggcggtgcacttaaaataaagaagtcaagtagttggcgtgtcgtcgacactcgatttcgagttagtgcatccgtaggacaagtaaaatgatcaaacgtttcggcgcattgtagtggaaaaaatgacacttggatgagcaatccctcctactcgttgtctagctgcatcagctccacattatcgaaggttatacatgcaagcacgttttatagtggataaacttgggcacaatgactcgtattcaggtctccttgttatattccagcacagaattcgagtcaagaaactcgattagttgattgtaactacgggcatctactgcgcctgtttcgcagctgcagcatctgcccggtaacgcgtctatatgataccccccccagcctaaatagcagcactaaaactatcaatgacatacggggccgaagcaccatgtcggagggtgcctccgcagttgcgatagtctttttttttcaaatagggtattatagttgttgacctgtgtccgttgccaagattcgagattgatggagaacgcgagcatcaacgcaaatactcagtttatttcagttcgcaggcttcagctaccggcttcagtttaccggagccagttaccgggcggacgccgaattaacctggccacatcactccctaccggggatactgctatcccagaataaatgagaccgcgtcaaacgaaaaggtgcttacgaagtacgaatcgcaatttaaccacatcaatcgaaagaggcgtgtcttaggcttcttttaagctccaaagtattgagaactcgtggagtaacatctgacctcaattttttttcgatttcgacatattgtatactatcggaaagatcgtgttaaaaacaatctaataagagtacttttacgcgttttacgagtggttttccctttaaaaatttggatgtctggttatgtccgaaatttgattggtcaacttcaaacgcgattatctcgataacttcaaatggtggcttagcgtctttttgtttgacgcggcctcaaatgttccctcaatgctactccatacctcatgcgctttccatctcgtctggtctgcttcgagagcaccacatcacactcttttttgtgtgattattgcagtcggtgcactgctactggtgtgaaacggctaacaatgaaattaagcaagatctagccaaaaacaataaaaaaacacccccaaactgcttgtggcatgacactcagccagtccaacaactagtgcattgcagcggagcaagaatatcctactcgggagttaggatggtccccagacgtgctgaatgggggctcctggaagtcggagtcacctacgttaaagtccctgtaatcacgcgtgtggctgtggaatctgcatgccgagttgcttagtacaatcaaagcgacgaagacaaccacaaaggcagcgttacccttgggtagctttgtcgcacagctcgttgctgtacaagtgatgcacctgtcggcaacataagaagtgttcgacattgcactttgctggtaatctctcttcatgcacgtcatgacacgcttgcgtgaggttggaagcagaatgaggtattgccgtcgagcacattagtagtaataatagactactatccgtgtttcgttcggctacttttcaaatagtactactaatggctccaacccccaagttatacactccacgacaaaaagatatggactccaccaaaagttgctgcaacttcgtcattttttatcgttttaaggtgtggtttggactagagttgcagaacacgctgataaagatctgcacgctgctaacacgcgcgcttttgcgggtacagataccacccagaaactgcaaaccgtataacttgatacccttgtggaatcatgatatcaagggacatcatctcaggagggagcgcgtcacattgaagtaccgccactgtgtggtctacacattccattttcatttgaatcatcccgccaaaagcatggcgcactttttccacagacaaactcaaggcagcactgagcacaggacgcccagcctccagaagcgtaccaagggtgtgtggctaaccattcagcagaagtgcgatgttattgaggagtatcaccctctctcttaaaagtaaaaatgaagtttgaggaaatagtggtagtaacgcacctcaatcacttatctcctcatattatataatttcctgtaggaacttggatgtaccgctctttgcagtttgtgggtcgtatctgtagctcacatacaaatcgctggttctgtccaggtgacaaaacttatggctaagccccatacaaaatcctatattaaccaaaaccccttccaaatgatacgacttggactttgtatggggcgacaaaggaacccatgatttctccactctaccttagtactgagccatacatcatcgaccaacagtttagaatggagaagacaatcgtatatccaagagatagcagcatacagagctacaaattggccctaactaggatgcaactgaacgtgcctcgcaaatcatcagataatacatggtagccaccactcgaaatttcagtcgcttagttttgtgcgatggtcgatgtatttattacaggttactaaacacacattctagtacacgataatgccatcagatctttgtctaacgtcgcgagtatcgctggttcctgtgtattagtcgcaggattttatactcggatgttgtaagtgtggcgatattatatgcgatatttatccttattcaatggtatactattcggatgagtattgtacatgtattggaatacacatccttacatcggaagagcccgttagtactatagtaataatctggtgatatatcggagttagaaggggggatgcagtacggttgccgaactcgtttaagtccgaggaaagttggagagagagacacgcagcccccaggcataaatcgtccgggctggagagcggcagcaccgtgctcctcctcctcctcccggcggcgggcccgcgagttgaacccgctcgcgatggagcgccggcatggtaatccgtcggcgtagcgaccggctgcccggtttccatgcgagcctggcgaccatggcgacgcggcgacgcccaagtcgccgctgcgaattaggcgcgccgaaacgcggaaatgcggccagctgcgcgaacagcatttgtatcagctgtcgcacgcaattatcgttcgatcgacggaatagcgactcgttcaaggagttttgcgcgcgcgttcgattgtggtcgctttgagtgaaggtgacttggattcagtaggctttctcgctggttatttttacgcatcgtcgcttcgcgtaattacgagtcgtcaacccagcgagggcggaagcaaggttcacagcaaccctgtctatagcaatatccatcggcgtgtcactgtctaacgtcaggatctgttccttgctctatgcgactctttataccaatagtgaccctctgctcttctcccgaatactatcgacgatcgcaggttcgtcgcactgtaaattagctatttccgacctaaatcggcgcgttttgcgctgtctctcctccactgcgagccggcgcccccctgtttctttcttcccagccagcataagccagtgcgcgcgcctctcctccgagcaagtaagtaccccgccgttgccgctctcggcgcggccccagcggcgcgccgacgccccgcgccagctctgcgtgaccccctgcgtctgcgctccacgccggtggcctcgcgatccgcgtagccgcaggggaagccgcccaaacgtgcgtgtgtctgcggcccatatactgacgctcttgctgttccccctttcggccccttgcagcctctttttcccctgtttctccctttccactctaggcagaaggatgtcccacccccgtgagagcgcgctggagctgcgagtcggcaagaagttccgcctgggccgcaagatcggcagcggatcgtttggcgacatctacctgggcaccaacatgacgtcgggcgaggaggtcggcatcaagctcgagtccgtcaagagcaagcacccgcagctgctctacgagtccaagatctacaagatcctcaacggcggacgtgcgtgcagccctgctttctagctgcatattaacctgggttgagttgaggttactaactgatatgttgtggtggtggtactattgcagtgggcgtgccgagcctgcggtggttcggcgtcgagggcgagtacaacgtgatggtcatcgacctgctcggcccctcgctcgaggacctgttcaactactgcggccgccgcttccagctcaagaccgtgctgatgatcgccgaccagctgctgtgccgcctcgagtactgccactcgaagaacttcatccaccgcgacgtcaagcccgacaacttcctcatcggcctgggcaagcgcgcccagatcgtgcacgtgatcgacttcggtctcgccaagaagtaccgcgaccccaagacgcaccagcacatcccctaccgtgagaacaagaacctcacgggcacggcgcgttacgcctccatcaacacccacgtgggcattgagcagagtcgtcgtgacgacctcgagtccctcggctacgtgtacatgtacttcatccgcggcagcctgccgtggcagggactcaaggccaacacgaagaagcagaagtacgagaagattatggagaagaagatgaacacccccatcgaggtgctctgcaagggctacccggccgagttccgtgcctacttcgagtactgccgcgcgctgcgcttcgacgacaagcccgactacgcctacctcaagcgtctctttaaggagctcttcttccgcaagggcttccagttcgacgccatgttcgactggacggtgctcaacctccgcagcggccgccgcgagcgtggcaccagcggcgagggcgagcgcagcgctcgcgctgacccgcgccaggaggctgcccgtgacggccgccagatcgcgtcgcagggccgcgtgtacgtccgtgacgaggccaaggagggcgacgcccagatgcaggcgcagcagtcgtaccgctcggcgggctaccgcgacgacaggcaagtggccatggacgcgggttaccccgccccgcgcgtggccaccggtgccagccgtgacgctcttggtgaggccaagcccatgagccgacagcgctactgagcttagcgatctgtcacggagcatgttgtgctgttgctgccaagtttttggcggtgatccacgacaacgctgctccacgcctggtgtgtctttggtgaggtggtgttggttgagagatcgatgacactgcacggaagaccgcgaacccgattgagaacgatggacactgctgaagaacttgatggaacgatgagcgagcgactgaggaagcgcgaacatacccaaataaaaaaggatgacggaggacggagagacacacgaagagacctgaaggccgctcacgagaatggaagatggtggatcagacgacgacgtcggacgacccgaggactttgtagttgtagtgagaaagaaggaggatgagagaagagaaagcaagaggatgatatggctgcagccacgaagcgcccattgagtccccttgaggtggatgatgccaggcccccagtaccgcggcgaaggtagctgcggttggtctttgacgaggccgcggtcgggtggcatgcgacgcgttcgctaacatgtgcgctcaacgcagcccttggtaacttcggactttgatttttcatttttttgtgataaataaatttaccaccaagtaacgcccgaggtgtccgtgctcgtaccatggaggacaggaaaactgcatcaagaggttgttactcttctgacttaaagctcggactgagaacaacggagcagcgtctccgttcagggcgaggaatgagatccgtatcgatgaaatgagctgcactgcgacgtcgcacgcgtcggtatagcgtgttcttggtgcgagctgtgatgatccggtcggtgtcttcgaacaggaagtcacccaggctgtagatggggatgcccatgtcttggatcgccctcatgcggttgaagtggcggtagacgctcgagttgacctgccgctcgtgctcagagcggatgtcgaagatgaaaggaactaggtgctgctggaagatatccacctcgttcttgaaagtgtggaagcggatgagctccttctgccagctaaccatctcatcggagatgttggctaaccccattcgataggcagcgtcgtccatcttccgcttttcagcgttttcagcagactcgaggttctgttcgcaatataccgacaacggttagctttggctttgagtgtgatcggagtgaatacaacataccatggtctcagtctgcttgacaagatcttggtacgcgtcaaggacaggtttagcgttgagtctgtcagctcgactccagcccgactttgctatctgttccagcacattgttagttagactttgaggtttcacgcttgcctcggagaccgaactcaccttcgctgtatgccttgcacccgtttgctcaggcttggatggatactttggtacaatcggaatggcccgctggaagtgatcgccttcacgaacgagccacggaactttcacgggacgaataggaccgatcgagattttgcgcggtacgatcggagggactggacgctgagtcttgtgatcatccaatgctgactgttgcttggggcggtgcggttgcatcggtgtcgttgctggtgtcacgttattccacggactgaccgcatttgatcgaaaaccctgcagcagcacaagtacattgccttagtcagctcgcttaatctcgttcattggtgcgcaacacgtacatcgatatcgaagccgtcgctctctcggctggaaatttggcgccgtgaatctgaccggcctgtcatttgcagcgcaacaacacctgggtccaaagctctaacagaatggagagttttcaatagatctcgataagagttctcgataaatttatggcaacgcagctggacatgacaataagcctatttttgacgaggtgaccatcagcgatgattcaccactaaggtctgcatatgctagagatttctcgaggcttgaatgcttctgtgttggcactgttccttcatacctggatcagcaaacatctcattgcttttatcaatgcaaggaggcagctctaccttcgtaggtgatcaaagcaattgtagatttgataagtatacaacaaagcgaccaaaactccgacgccatccacgttcgcctgcaaattaatcagcgtcgaatccacgtctgtacccgagcagccttgaacgtctaaaggtcctccatgtcgtcgccgctgggcttggggtgtgcaggcttgtacgtctcgacaccctttccggcgccttgcatggcctcgttctgtgtgtactgcttctgagcgacgtctttcattctacattcaccaacaggcaaaaaccagtcaaaatcaatgccaatagcaaccatctgcaaccaaaagccgtcctacctccgcttgtgcaccttggtcttgaggtgcacgtcgcgcgtcttctcgtcgataaagtggcggccgcacggcgtgcagtagaaatgacccagactacacaacaaccacaagaaatcagtgcaaaatattgtcagtacactgtactacaggttgcagcaatacaacggcaggctgacgcaccccggcaggtcctcgtcctcctcgaaggccatcttcttgcccgagagcttctccacgcgcaggtcatcctggatctggtcgatgtcgcgcgcgcggttcttggtggcgtggccgcgcttgtactgcttcttcttggcgtgcgcgcgcgccctgcccgatcccgatcgtccggtgcccatgactacagtacgtaggtctctgctcgaggtgctggcgagtggtgcagtgcacgctatgcatggaaatttcaagcgaagcgattggatgggagcaataaggttcgtaacagatatgtaacgtgttaggttaaatctcacacgtcgcagaatttccgggatcagtagcggaacgacttgcgggtcaactcgaggcggatatcgtccttgagcgactggaaaatggtcgggaacgccatcacgtcgcgcggtttcgtgtctacccacagcttgttgaagcgcgtgaaaattgtggctgcgcgcattgaaggttaaggaagttagagaagttagaaaatggattggttcgatcgagcagctcaaacgcaccgtagacatcgtggagctcctttagtccgacgttaacgctgttgttttcacccccagcaccatggcggtacaacttgatgtccagcagacgctcgtcaatcagctcgatcatgaaggctgtcacgttgatgcccgtcacggcgaacgggtaccagcgggttgggtggttcgactcttccaacgcactgacaacagaaacatcgcacaatattatataagcacagcttctccgaacgcaccaacacagcggcaaggcccaccgttgagcttcaactttgtagtctttcgtgaagtggttgagctgaatcagcgagaagacgcccatgcctcggaagtccgacatcggatcggtacctatacgcaaaaagtaaagcgtaagcttctccaatgcaatgtaacatatcgcgcataaagatctcaccttggaagccgatctcgccccactccttcgtgatgcgtccaccttcgcggcgcacatcaggcttgagattcttccacagctgctccagcatctcctcgtgctcctgcttggacgagctgtagctttcgttcttcagcgcgtacacacgcgaatacaccgtgttgacaaaattgcagcgctgaagacacgagcgcacattggccatcaacctggaaacgaacacaaccacatacatccccaacatcaaccgatcttccgagcaatccccatcaaacctctcacacattcaactcacgtgacatccctctcatccagctttgccctcgtcgccacttcatgcaacgttgcatccatctacagtccaagccaacaacaatagcgatgcgtcactacaccggaagcagcatccaaccaaagcctcagcgtgacgcaatccgcaccgggaacggctcgttgtcgaacaccacattgcaggtctgcaccatcttgttggacagcgccagctccgtgcggaagcgcacgatgcgctcctcctcgtccaccccagcgcccgtggggctgcacagacgctgccactcgttctggccgtagaacacgtgccctgcagcaataacacacacacacacaggtcacaacgcaatacacagccagtacaatacacagcaacatctacgtacaaatcgtgatcttgacccagcgccagatgcgcaccacgaccgtctcgttggccgccgcagcgcgacgcactcgcggccccgccgacatgattcaactggaaaactgactaacccggatacaccttgcaccttcttgtgatgcttccactgcgctcccattggtcaaaacgcgaaattatagaaacctccttctgattcgtcgaatcggtagcttctttttcaaccaaccgcagcgcgtcaaaattcaaaccgtagaaagcttaacgcgcggtaaccagacgcctcgaccggcgcagaggatggaggacaccgcggcgctgctgggctcttcgggtgcgtccagcccattgcatctcctcgagcgccatctcctctctctaacgcactaattttcacttaaaatttcctcaaaatgcggccacaatcgccgtccgcagccatcaagcagcgcttggccggcgtcacggggctcctggagcagctacgcaggcaggacgcggcccccgaggcctcggccacgctcatcccgcacgtgctgacctgtctgcgcgaccacaactccaagatcgcgctgggggcgctggagatcctgcagctgctggtctcgcgcgtggccgagagcacgctgcgctcgtacttcaagctgctgtggctcagcctcgtagagcggctcggagacagcaagctgcccgtgcgcgagaaggccgtggacgtggtggtggagatctccgtcgtcctggacgttaatacagtgctggacaagctcaagggatgcatgggccacaagaactggcgcaccagggagcaggtacaggccagaagagggcggggaatgggtggagcttaggtcctgacgctggttgtattgctgcagagtcttcatgcggtttggaggtgcctggagcgacatgagctgttcaaggagaagcaggacgagctgttggacgatgtgagtgggtgacgaggaagggtgttgatatgattggcatggtcctgatgcgttgttgtgttggtgggaagcaggtgctgaagttgctgggagactcgtcgaaagatgtgcgggatgcggcgattactgcgttggagaagttttacatgtatattggggcttcgttgctggtgggttggaatggaagctgatgatggagttggtgatgcagtaggtgcttacaaattgttttttatgttttgcagagtgatctggagtataagaatatccgttccgcgcaagtgaagacgttgacagataggttcgagcggattcctgtccgtggcaaagagagccactccattacgcatacggcgccgtcgtacgatgatcgatcggtacgctgaagtacttgcgattgtattgagtattgtataggtagctaagtgtctggatgttgctgcagaaccaggattttgacgacgacgctgcacaggacaatgctgccccccagaagtattcctcaatcttgtcgtcgtacgacttgcaagtctcgtcgtcgtcatcttcgatcgctaggtacctggcatctgttcgtagccgaacaattaacgaagcgaaagctgtggctcatgtgtcaggtgatggcgaccggtctccttcacaagcatcgtcaacaagtagtaaagtcgtccaggatttcagcacggcaggtacatttggctctggcgggggtgacatttcagagaaggaaattcaaaagcagctgggagtgatttttgacaagcttaatctcgacaacaactgggataagcgtgtcgacgggctgaaaatgctccagaagctggcgaagcgatgcggcagtgcgtcaaatagcggagtgctcccattcttatcacagggtcttcgtcctattcgagagcgtctttgtcagcaagtgagcgacctacgatcgtcagtgtcccgagaagcatgccaaacgatccagacactcgccaatagtctgcgtgatgagttcaatgcccacgcagagatttgtcttggcaatctattgaaggcgacatatgtgactatccaagtcatttcgacttcggcagacacgacgattcggagcatgattgaaagcaccagcaatggttatgcacgcgtgattccgaagtaagttattgggctgtctttattgctgtgtctgcacagtggctaacgttacttttattgcttccaacattcaggttaattgagtgtgccaagtctcgaaaccaggtgcttcgatacaatgcggtgtgctacttgacgatgacgctgcagcgatggagtacaagtttcctgagcaagtacgtacactcctccttggtgctgtactatttcgaatccttgattgacgtgtattgtgttgtggtgctgtttaagacactcggatatgtttgtgccgattttgcccgctcttttgcaagatgcgctgggcgatgtgcgcgctcagtcgagaaagtgttattgggcttttcaccacctctttcaggtaaatgcttgcaggcatgtaagaaacgcatgagcatgctaacagaaaataatgtgttgatcataaatacgaacaggacgaggctgatggcgtattcgctcgcttaaatggaacgacgcaaaagaacttgaaggatgatccctcgaaatttgcggcgaaagctgcacgccagacggagtttagctcgatggatgctccagcttcccaggctgtcgaggtcgtaaggtcagcacttcggacggccaacgcaattcatccgtccagcgatgctccgggtgcttcaagctcagtgacatttagcgatgaacacctgagtgtgcagcgcgtgccaagttctggggatttggtttctgaaaagttaccaagacgggttctcggaggatactcgggttcagttggagacgatgcagctcaagacaatctgcagccttcgcgaatgctatcgcaggggccgatgcgtgtcgggagagttaaaactcccgtacccaaggagaaatctacgtcggcgaatgataggaagaaaagtgccccagcgggccctctgcgggtttggaatgccccgccgaagccatcgcaggcacccagcacggcagtggaaagtctttacacgtcgagacaggagccatcgactgcgagcttccacaccagctcgaagaacccgacctctaaagcgcaacgagttcaacatgcagctgaagctcaagccccagttccgatggatatcgacgacgcacagcccagtggcccaaaaagatttcctgttgcatcaatcccttcgccgactgcgtctaatgcgtcgagttcaagaacgaacaactcgtcaaggggtgactcagttgacatgaagtcgaagccagcacgcactgcaccagtaaagtcttcagaacgacctaaggtagcgcaattgcccgtcctcgatgaacttgaggaagcactacggaatattgaaagcaggtcctggtccaccaggctggaggctgccgagtacattggtaaaatcctcctgaaacggctggatcagattgacaacggtgcacgtggagattacaaggtggacggccgaattctgacggtatttatcaagcacttgagtgacgcgcactatcgcgtctcacagggagttttgaagtatttcctgccactgttaaagctatcgagcgacaaccagcgccttcttcctcacctgaagacggttctaccgaagctgtttcaaaagtatattgacacgaaggaatccattcgggtgattgccaaggagaatctggagtatatcgcttcggcgatcgatagctcgacgctggccgctctggtgatatcgatgcttggagacggcagtaacatgaaggtcaaggccgccatgtgtcattatctgcgcgatctgctacctggggctggagagtacttgaagcatggagccaacaacagccacatgaggtcgtttttgctcaagcttgctctcctcatggacacggacgtccccgtttccatttcttcagcttgcggtgagcttgtgtcgatcgccgcgcagctgtatggccctgagatggaggtcgctctgggacttctgcccccgtcaaagcgtttggtggtttctaaggtcctgaagtccaagaaaatcgtcctgaacttcagcaacacgcctaggccgccgctgtcttcctcagcggccccgcactcagcaagatcgcgtgatggcggagacgacgacaaccaggacatggagctcccagcaccgaagccggagcggtgtcgaaagcgaccagagtcaccgagcgtgagttcctcaagtcctgctcggccaagcagccaaaagaggatcaacacggctgtgcagatagcttccccagtacctgtggagagccagaggactgacgaccgcccgagcagaccagtaccagctaaacaacccgacgagatcaccgggaaggctacactgtcaggacagccagcgcagtctacagcagtgttttcgtcggctgcaaccaggacgaacaagtacgacgtgcagctcgacgatcttctcctgctcctcgagcagaacaatttgtccgaggcggagatcaagcacactctctacaaggtaattttttttcattgaacggtcaagttgtgggcattgaactaactgtgatttctgcaaacagaccttacacttcatcgaaacagagtcgtccgcgacctgggatcgttgctttggccgcttgctcctgctgctgctcgacgctgccactgacaaggacgtatacgcgctcaaggttctccagaaactggtcgaagctcaaccttctcgagcgcaaatgtttttcgagctgcttcttcagcgcctgattgacgcgatcggttaccaggtggacgtggtgagtgaatgaagcttgtcacgaccgacagcttcaagatctaacgtcttttttccctgttatctatcaaacaggctcgccacttgatggagcggattctgcacgacctcgtgagcttcgccagcgaccaccagcaaacgctgtcgacgctgatgccgctggttcctcgcgtggacgcgcctgcacttcaagtggtgctgcgcctcgtcaaggtctgcctgcaaacctgcgagcgcagctctgctcagaatgccgcgttcctgcgccagcccgacgtggccaacagccttatgagcgctctgacgcggcgcctggaccacgcgagctcgagcgtccgcaagaacgcggtggactgcctcgtggccttccacttcgcggccaaagaggacagcgcgatcgtgcccaagttcctggcagccgagctggacgacacgcggcgacgactcgtcgagatcttcatcgaccgcgccaaggtggagcgccaccccgtcggcctgtcgacctgattgagagttgagcgtcatgcgattgagacctacctaaccagtaacttattcgataactcggaggtgccgagttcaacactgtgccgttgctaacttcagtccgacaagacgccagcctcccagtctgacccaacattacccatgaactccaatgtcgactgctgttattaaggcaaatccatggcccagggaggatacgaaggacgcaatggacacgcagccgagttgaagtggatggccatcgccgcgtctcatatgtacgacacaccaacaagggccgcttcggccaaaccaccggacgcgattccacactcagccccttctagaagggtattcgatcccgaaataccgtctcataatagaatccagctagcccaccttctggcatatatacattctctcaggcatctgatattccctcgcacagtcctcatcacgtcgacgcaatgtgcggccggcagtctcagaaatctcaagtggagcacaggacggtgagcaggaagcccagcgtagccttactacgctactacactactagacagcgccatggtgctgacgaacgagactcgccacgtgtaccctttccagtgggacgtcgtcacgcgcgccttctggaacaagtacccgaactcgcgcctggcgcacgtggagcgcgtggacgtgctggaccggcgcctggacgcgcagggccgcctcgtgaccacgcgcctggccaaggtgacgcagaggaacgtgcccggctgggtgcgctcggcgctgggcgactccacgtacgtgttcgaggagacgacgtgcgacgcgcagcgccagcggctcgtgctcaagtccacgaacctgtcgctgcgctccgtggccaccgtggaggagacgtgcgtgtactcggtgcacccggaggacgccagcaagacgctgtacgaggccgaggccaaggtcacggccttcgtgccgctggtgagccagaagctcgagaagttctcggtcagccgcggcgccgagacggccgccaagggcatccgcgccgtggaggagatctgccacgacatctttgaagggacgttccagccggcgttctgccagtcggtggacgcggccaaggactcggtggcggccaatgccgtgaaggactttgcggcggctgcggacaagtggacagaaaagcagtagagaggagctgtactggtggagtattctgtaaatggaggaccgggagaggctgcagcagagggtttctccggggtctcattgcaataatgtcataaggcgtcactttttattagcgggggagttggctcatgggctggtgtgaatttggctgggtttggattggagtcggggaacctgtttcgtgctctcgttgaacttgaactcgagttgtcggcgcctgcatgcttggccattgtggaggagcgaggcattgcttcgccatgttagacagagcgaacgtagatgcttacccactggtgcgctgtacttgcactgtaccgtcacgattcgattctggaaatgtggtaaattggctatggcgagtagtccacgattgatgatgttccctatctctcgctttgccccccaaaatattgcgttgatggactggtagacacagttgaattgcaagcggcagcaccttccgactggttatcccaaccacccaagtcggcttctactttcattggtacgatgagtaagatctaccgaggttcgagttctagcgtgttgctggccttcctcattcttttcgcatcggtcggcgctttgccggtggatactactggtacgaaacacgcgaaggtgcttgcagcagggcaccatttcctctttgaaggtccaagtgtccaggatgatggccacatcaaccggcgactcagggcccgtgaggaaagaggggttattgaccaacttgttgcgagcaccaagaagttatggggaaaagtgaagccggatcagcaacagaaggccgacaagctgttcgcaagtttgaagacccagaaacatacctcagactgtttcaagaaccctctgttccaaaactgggtaggaaccgtcgacaagctccttgcagcgcggaccaagaaattctcgcaaaaatgaaggacctctatggcgtcgagaccttggccgggatgatagtcacggcgaaaatatcatccgacttgaaggcaagcgcgatcgccacaagactcgagaatgtgcagggatgggtcaagagaaaaatgttgcgacgtcctgcacctgctcaagttgggcgaccaaggggacgcactcttccatagtccagcggtccacgcgtgggcttcgttcgcaatcaaactcgatgagaagcgcgcaggcgagatgatgcttcagtcgctagaaaaagtgacactatacgatgaagcccgcttggtcaacatgctacttgcagcgaaagcatcatcagataccaagacgctcgccactagaattgaagacgcactcctggcgacgtgggggaaggataaaagtgtggatggcgtctttcgtctgctcaagctggacgatgaaggaaccaaatttctggatagccccctaatggaagtgtgggcagcgtatgccatgaggctggacgagaaccgcgcaggttccagtcactaaagacacgctttgatgatgtaagcctgaccaggatgttctacgaggcgaacaaagcaccagattcgttgacagccttcacgattaccagagtcaatgaactaaagcaagcccagatcatggattggatgacgaaacgcaaaacggttgacgacgtccttcgtctgctcaagctcgacgaggacggagccagaacccggttataagcgcttggtctttgtacgccttcaagctggatcgtaaccacgcaggagagctgatgttccggtcgctaagaactcactacgatgaagttaccctgactactctgcttgctcaagcgaaaacctctcactgcggcgacagtggtctcgaaactggagactgcgcaacgcaaacgttggacggatagcggcaaaacggttgacgacgtgtttcgcctgctcaagctcggtgacgaaggagacaaactgttccaaagccccgtggagaacctttggggtatgtacgcaaccaagcgaggcggagacagcgcgggcgatctgatgtttcagtcgctaatgaaaagccacgatgaagccagcttggtcaagatgttacttgagacgaaaaaatcatccgataatgttctcaagaaaatctccatgaaagttgagagcgcacaactggcaagttgggcacggaaggagaaaactgtcgacgacgtctacctcctgctcaatctcggcaatgaaggagttaaactctttaaaagcccagtggcggatgtgtagattacgtacgctaccaagctggacgagcgccgcgcagcagagttggtgtttcaagcgctaatatctcgctacgatgacgtcagcgtcgctaagatgctaattaaatcgacagggtcacaggctcgatggacattcgccaatcgagttgtggatgtccacctcgcgagttggcctgccaagcgcaaatctgttaacgatgtctatcgtctgctcaaactcgatgaagagggcagcaacctattcgccaatcgggctataagagcgtgggattcgtacgcaacaatgctgcacaaggagcgcggagacgaagtgatgctggcttccctaaaggcgaaccattacaacgatgccactctgagtcgtatgatggaacgggcgcagaacggagcacgttgcgacggcgactcaactctcgagttggatggatcgcgggaatactgttgaaagcgtctttcggctgctcaagcttgatgaggcgtacgcaagcaagctggatcgggggcgcgcggatgagctgatgctagcctcgctgaaggcgcgcttcactgacgaagctttggcagaaatgctgtcgagtgcacgatcctacgattcgctagcctcaaggctgtggaagaagatgcacatgtaattgagcgaggccttgctatgaaggagcggcagtctcagcgatttcagagatgggaatcaggaactcaagatcaatgggcagctagtctgtttttacttgctgtgtttgctttttagagggggtaagtacgatttatagcggcgcacatagcctagttagtgactgaatgtgcaactagcactcacactacacattcccatttccacgtaatcgctccagaatcaaaacagcaatttgaatctacggatgaaaaacggctcgtcactaacgggaatcattctctcttctccaacaccgcgtgatgttgagtgtagtgttctttgcgacgccgccattaaatctacgcaaaaaaatgtccggaagctaatacttatcaaaagggctagagtaatacttcgcaaatcacgagttcctgttcccttggccgacacgatggttcctatgctgtggttccaattcctggagaggcttcgatcaactatactacacccgctagctcaatcttgaggcaagcgaactgtagtgtcgaccttgtatcaacatattcgctaagactttgtcgtcataccgcgccttcaggaaagctagcatcgtcttgttcgcgcgtcccttgtccagcatagttgcgtacgcagcccataggcccaccgctgggttactgaagagcttcgttccttcttcgtcgagctttagtaaacagaagacgccgtcaagacttttgcggcgatccacccagttcgtgagctgtgcggcttcgagcctcgttgccacatcttccgacatgccgaactgctttgccgacgcaatcatccgacccaggctggcaccttcgtattgtgccttcagggatgctagcatcacttcgcctccgcgctccttgtgcagcattgtcgcgtacgaatcccaaactttcatagcccggctgtcaaggagtttgatgccttcttcggcttcatcgagtttgagcagacgatagacatcgtcaacagttttgcccttcaaagcccagctcgcgaaatgaacgtccttaactcgattggcgaatttccacagagcctgcgatcttgtcgctctagttaacatggtagccaaactggcatcatcatagcgagatattagggcctggaacaccttctcagcagcgcgggattccagcttggttgcgtatgaaatccacacatccactatcgggttttcgaagagtttggctccttcatcgtcgagcttgagcaggcgataggcgtcgtcgacagttgtacccttccttgcccaatctaccagctgagcgtcctcaattctagcagcgatttgcctgagaagattatcggatgattttttcgcctcaagtagcatcttgaccaacccgatttcatcatggtgtggtattagggactgaagcatcagttcacctgcgcgcttgctgtctcgcttgattgcgtacataccccaaagttttaccacggggccttggaacagtttgtccccttcgccaccgagcttgagaaggcggaagacgtcgtcgaccgttttgccgctatccgtccacagtttgcgttgcgcagcctcaagttccgagattactggccccgtagtgattgagggtttcgcttgagccagcatagtagtcagggtaacttcatcgtagtgagtcctcagggaccgaaacatcatctctccctcgtggtcacgatccagcttgaaggcgtacgaagaccaagtgtgtatcagcgggttgtcgaagactttggctccttcctcgtcgagcttgagcagatgaaagacatcgtctaccgttttgcgttgggcccaattcgcgcgttgggcttccttgagttggtcaaacatgtgaacatagtcggatttccaccaactggttgctttgttggtgtcaagtaacatcttggccaagctggcgtcgtcgaagtgtgtggctagtaactggatcatcatctcccctgcgcggttctcgtccagcctcattgcgtacgctgcccacacttccactaggggtttttcgaacagtttgcctccttcatcgtcgagcttgagcagacgaaagacatcgtcgagcttttcatcgtttagcatccatttcttcagctgtgcgtcctcaattctagtggcgattgcgtccagctctggcgatttcttcttcgcagggagtaacagcctggccaagctggcctcgtcgtagtgagtcgtcagcgaccggaccatcgcctcccctgcccggttcttctcgagtttggcagcaaacgcccacatatttacaacggggttgttgaagagcgcgctcccttggtcgtcgagcttgagcaggtgcagtcgcaggacgtcgtcaacatttctgccttgagtcatccagttgttgagctgggcagtctcaagtttggtggcgagcgcgattgccttcacatcgggtgatctcttggccgccactatcatcgcggaaagagcctcaagaccgtagagacccgtcattttcgcgagaatctcttgatccgcttgagaggtcaacggatggagtttgttgacttttccgatccagttcagaaggagcggattcttcaacacgtcggacgttggtttctggattttcaaactggcaaacaactcgtcggctgcctgctggtgattgggcttcactttcccccacagcttcttggtacccgcgataacttcgtcaataggccccctctcctcactgctggcgagcttactcccttggttcttcataccagctctgaggtgtcggttgacgtggccaccatcttggccactttgacctcccaagagaaaatggtgctcggctataggcaccttcgagagcctcgtatcctcgggcaaagcgctgaccgacgcgaaaagaatgaggaaggccagcagcttgctagaaattgcacctcggtagattttgccatccctcatcatatcaatgaaagagtgaaagtagattttaccttggtgaggcccccattcttgcagcttcagatagccagtcggaatttacaccactgttcgctacaggaaatgcgcatgatgcgtatacagtgtacctgcacatgcaaagcgagagatagttggcgaacatcatcaatcggtcttcataatcctagtaagttattattttattaaaataacgttattgccgcttgcaaatactttgtcctctaaaatcgacctctaaaatagaccacgcctgtttcttaatacgagtggacacgagataggcgagggctgggctgttttaggtaataagcatgcttcatagcaactggttgcaaacaaacaaagctggcggtgccaaagctttattcaggctcagagttgtccaaatttagtacagtacctacgcataccgcttttgacgattatggagactgattgatgatgtttccctaaattatctttcgctttgccccccccccccgtgtgtgttggtacctggtgactggcttttcgaaggtgactgactggctttccgaagctcgtcctcacctacctgccacccgtgacacacttcaaaatttactttcattccgatgagtgccaatataaatcgagctacgagttcaatcatactgttggctgtcctcctcctttgcgtatgcgttggagtggacgcggcgtgctcgaaggtggttgcgatcgagcacagcactctttttggaggtcaaggtggtcaagatggcggtcacgttaaccggcacctcagagctggtgtgaagaagtacggggatcgagacgaccgcgacgaggagagagcgattgggtccactacagactggctggttgcgagtaccaagaagttgtgggggaaacgaagccaagtcgccagcagaccgagacggcagacgacctttttgccattctaaagaccgagaagcactcgtcagcgttcttcaagagggtatttcaaaaatgggtagaacgagttggcatgctgcacccaggggggacatctactgcgaaagacctagaaatccttgataagctgacaggtctctacggtgctaacgctgtggccgggatgatagttacggcgaagaagtcattggatgcgaaggccgtcgcaatcgccagcaaactggagaacatccaagtgaagaattggatcatccaaggcaacaatgttgacgacgtccttcgcctgctcaagctcgacgaggaagggaagaagcttctcaaaaacccggcggtgaacctctgggcctccttcgcagccaagttcgacgagggacacgcagacgcactgatgctttcatctcttaagacgcaaggctttggcgatgccgatctgtttcgcatggcctgggcagcgcggaaagatacaaccaagggtttggcgaagaggcttgaggaagcacaactcgcagattggttcgaccagaaaaaaaacggttgatgacgtccgtcgtctgctcaagcttggcagagaaaaaagcaatttcttcgaccagctacctgtgaacttttgggtccgtttcgaaacgatgctggacgagggacgtacagacgagatgctgctagcttccctaaggaccctctacgttggctacaatgctgacttggggacggagctggaaggaggtactatcacgattgcagcagcagtactggctcagcgaagggttgtcgggggagcacgccttgaagaggctaataaatggcggggaaaaccttttcaaagatcaagtggcaaccttgtggttctcctacgtgacgaagctggccaaagagggcgagaatccgagcaggaccgcgctttcgatattgcagacccattccaagaatgagtgggaactgccaagtagcatggcgaagggcttaaaagaatccctgtacaacaaagcgctccaggaactccagagacagcaattccagcaatggcggaaccagggtcacaacctcgacagcgtatcggccgagctgcaaaagcacgccaaaaatccatttaaccaagaatacgctcgtcgcgctgtccgcgagttctttaaaaagtcggtagcccatgagaccaaaactaatactggtgtagttggcgatctacagtttttctaatggcctgaagtacattcgcgatcaatactcttgtttcctttctattctacttcaatggcatgttgaaattctacaattctctggcggtgaaaagcattagtatcatggaacgtgatgataaatattccagcagaggaagagacggaggacacttttcagtaatgcttgatccatgcacttttctgcattcgcagattttcgatacgggcatccctaacttggttcatggctagcggtgatcagttcgactacagctgcaggctccgcttcatcaagagaaacccagcgagtccatgccacagcgggctcacttcacaatttcacccctacaactcacacgcagccccttcgcgatggaaatctatcaagaagtcgagctcgacccgtgcgtgccaacggtcgacctggacatcgacgccttcctgaccaacagcgagtttttcgcattcctgaagttggggatacccggcgacgacgcctcctttgtcccgagcaacagcgagtttctcgctttgttggatttggtgatcccgagcaatgacgcaccactggagcagatcacgagctatgagcacccatcgctcgacttctcgcgtcgctccaggctttcaccgctgttgccaccccagcaagtcgttgacttgggcgcttgtatggactcctgttcgtcgatgacatcgtttctccgcccagaccctgcgctcgatgtccccacttcaccggcggttgctactcccgagctctttcaaataacccacgggagatgcggcggtggcagacgctgcattgcctttggctgcaccaacgaagctcagacgaggggcctgtgcaagcgtcatggcggcagagcgcgatgcagagtgcccaagtgcaacaaaagcagtcaaagcggacgactgtgccgaactcaacgcagtggcgagctgtgcatcgcccctggctgcaagaaaagcgcccaacgtcatgggaagtgtgccacgcactcttctagataggtgttccgtcgagtgtatcttcttctcggagaatttgatgtgcagctttcattcttccatcgcgcatgcatacatcacgcggcgtcttgtttgttgagttacccaccgcttctaactgttttagacttatctatccattcatgattcttccccgcttacgactgctcccatttacgtagcggggtcctcaggcgctttcggttggtcctcggatgccgttgcttctgcaggacttgacgtctctccatttgtttcaacggacggaggctcttccgctgaggctgcagaggacgagctcgatgaatcgtccgtcgacgatacctgctctggaactgcctctgcgctctctcctggttgtaccaacgatacaggctgaggagcgtctcctgcatctactggtggggttgccgacgatggagctggagaaggaacggcaggtgctgcagcctctgttacctcctccggttcagcagttgcagacgcctcaggttttaccaccggagtctctgactccacttcgcttccctgctctgcttctgcgttgatcttggcctctgcttctaatttcgcttgcgcttcgcgtcgctcttttacccgctcggacagaacggcagcaagattgtcggcactagcaaactcagtcgtcagaatcttccgcaatacatccgggcattcggggtgttctcgacataattgctggtacttgaccaatatttccgagaatacaatgcgcacgttcgaaactgggtccaacgccaacgtgaaaaacactgctgcgaggttcgacgagaaaaagtcacgagctgcatccgccagagtcgcgtcctgttgtgctttgccgtcatcttgagactgctcttgtgacggagttggcagaaacgatgcgcatatcttaacgaagcactgccgttcctgataatgtgaagatttcgcgagggtcacaaatttttcgacaatagcagtaagccactcggggtttgagctgaggcgtgctactagcagcgggcatgcctgcagacgcgaacaacacgccaaaacgaccattagctgacggcacaaagagacgcaagggcataaaccagtgcacgtacatgatagctttcttctcgcaccacagcaaccggatcggtgacaagcttgaacaccaaagggttaataacggaaaacgtcgcctccggtgtaaacgtgcggcaaagctgcgctagctgaccgctcagcacttctcggaatcgccacttggtagtgttgtcgaaggaatcaaactcagccagtactggtaaataactttcacgaaacgacggggacacattctccaaaaaatcggcaaagtgcagcatcgcgcccagccgcacgtcctgtacatcgtggagatagctgtcgaacgctgtggcgagctgtgtctccgtaatgccttggcccagaatccgcgccagttcgtgcaaagaatacgcgaatgaccgccggatcttccaaaaagtatcgttatgcagcagctcgaaagtcggcgatagtttaagccagtcctccgctcccaggatactcaccaccgccggaaagttaaacgcacagtgaaacttaatatctacctcgccgctgccgcccagctgcgaggctgctgtcgtagccatgctcgtgaaatgacccaccagttcatccgtaacctgctccttgtccaaggccgccaagaacggccccaaactctggtacgcggccatccgcacccaccgcgacgaatcgccaataaaactctcgaacatcggtatcagtagcgggccacggtcagccggcgccaatgccaacgcaacattcaccagacactcggcgcacgccttgcgcacaccccaaatatcgtccttcgccagccgctggaaggccgggatcagccgctcccgactcagctccacacctgcagtcttgcacacattggggaaactcaacgccgtcgacttgcgtacccgaaacaccggatcttcggacaaagaaatcaactcgggcacgcagaactgctggcacagctcggcgccaaagtgctcggccaggccgttgtagagcgtgacggccgagatccggaactgctcgttgtcgtcgtcgtgggccagcggtagcacgatggtgagcacgtgctggccctggtcctcgggcttgacgagcgccgccatgtccacgaggctctcgctggcggccgagcgcacctcgtgctggtcgtcggacacgagcttggtgaccagcgggatgagcttgtccagcagcacgcggtagccggcgtcgggctcggcctccaccaggaactggcacagcggcgggaactgcagcgccacgtgctggcgcaccacgtactcgacgtcgcacacgagcggctcgagcagcggcagcagctggtcgcacgtggcctggaagcccacgccgcgcgccgtctcgtgcagcatcttgacgtggatcacgcgttgcagcgcgatgttgctgcacacgtacttggtcacgcgctgcaggtcgctcaggctgtcgtcgatggccaggtcctcgaatgtcgggccgttggccagctccgactccttggccatgagctcctcgtcgccctgcgcgtagtaatcatcaattcaacaaataaataagaaaaaaaataatattagaaccttgaattgccacgtgcatgcgattcattcttgacttgaattgatgtgacgcacgcaccaattcataatccatgggcgcggtagccggccgcgcgcggcgacggaggggggaagaagggaatctgcggccgccgcggcttggagacgcaggaggcgcgtacgcggcgcggatgagctgagcgaggggctgggggcgccacgcaagcaggcaagcggaggaagagcgcgcgatgcggtgcggctccggacgtttgctgttgttgttgttcccccctcgccgaaaaacctcggcgatcttggggataaaaccctgtaattgttgcgcgaaggtcgtttgaagactggtagagctgtagagtataaatgataagttgtagggtgcgtggccaggagacagcaaatgcttgccttgaaaacagagaaccagccgaccaaacgagttgacgtgatatgtagtgctgtacggatctctagctgctgtagctaggagaatgcagcgcgttgcggcggatatcttcgcagcgcgcttgatcacctcaccaccaacagatccctttctctgacctggttgaagtcatcgtgaaaagtgaccgatccggcaaacagagaaagctccagtcaactcagacagacagtctagtctatacatgtactagtcggcggatagctaataatacatgcacgccgatggtaaatagttgtcgccgtagtcagaaattctacactaatacttctgctgtctggaaagtggggaaagtgggggaaatggaggccccgcacatggccatcgcaggtacacggctttgactaggcagttcctgcacgcactcgtattcatcggtatgtgtattttgctgcattgttcatgcagatagtcgctacttgtgggcggaggtagaccgcctcaaggcgctggtgcacgagctacgagctgccaaccgcctgaatcaagaagaacgggctcgcacagcggatctgctggcgtctgccgtcacgcgcgctcagttggacgccgcgctgtctacgaaggtatcgctggctcacgtggacgctcagatggacaccatgcgagcggaaatggctactcacttggaccacaaagcggacgtcgcgtcgctgctcagcttgcaaagctccaagctggacgtgtccgtgttcgaagcaaattcatgggacctgcaaaagctccgagctgccatggagcagcacgtgcatgatttattcgcaacgtttgccggtcaagtggagcagcaagttagctcgaagatcggcatcgacgacttcaaccgcgtcttcaacgtggagaccaccgggcagaaggcctcgctggaagccgcagcgctgcgcgtcgctaagatgacggatcagcttgactcgctcggcaactacgtgaatggtgaccgacagcgccagcgacaagtggcggagctgaatgtgaacatgttagacctcacgcgtaagcagacagcggccagaaattccatcgtacagctcgaaagcgccgagcaggctacgacagctcagctccgagcgttggacgaacaaaccagcctagcggtggcgaacatccaatctttgacgcaaacgctgggtgggctgcaggcacagacgcatgctgacaagagtacccaagacgccagactagctcggctcgctaactgtgtcaagcagcaggaggcacacagccagcacctagcgaatacattgagcgagctcgagcaatttgcacacaaagggctgttggatacgttggacgctaaaatgaagacaaacaacgacaagctgcgcaacgagctcaacgaggtgaacgcagtaactcgccaatacacgcagcaactgagccagcggatgaacaaagccaatgaagtattgctgcaccacaaggagcgtctagcgcaactggatgcttgtctgcggaagttggcaggtctgctgaaagaaacacaaggagatctcgacaatgttaaagggccgctggcaacactggcgactaacttacacgaggagaacgtggcgatcttgcaggagattgagcggagccaggttcgtgacaccaaacactatgtgaaccatactttatctctaactcggttaccctgtagaatggcacacgcgacatcatgctggactaccaggatctactggagagagagaagagctcccaggtgttcgtgccattgccgtcccggccgtcatcatcgtcatcaagcggctcgagcgactccgtgttagcgagtcgaaagcacaagcagcaaatgcttctcgcgacaaaggttgcgaatcgacctcacacttcgagcgcgcgcgtccgggcgtgtagtacaccaactggtatcttccctgctggaactcgaccaggccaatccaccggtgcagtacgaagtagcaggtcgccatcaataccatggcgagctcagacagcaggggccgttccaaaggttcttacggacaagtactcagttgccgatcaccgacaacaacgcgagttcagacaatgtcaaggaagagaacccagctgaagaggaaattaggattgcagcacgagtttcggttcgaaaacctggatcgaaagaccccggagcacgaggtgagagtgcgcctttgagcctcttccgacacacaactggaaacgatgatggtgatctgtttcgctttccctcaagcgaagaatgacgttgatacacaagttaaggtagtgttgctctatttttctgtttactgcgagtacggtaaggaactgcacgatgtgtggggacggagctgcgaagtgcagaaggatgggaatactatggacccagccctgtgaggatctcgaagccagtaccttgtagtcactggtctcggttcctgtacttatctgcgcttgctgctgtgtttgaagtactcagagacgcacactgatgttgtcggtgtgcagctgcgccttgacttcttggatggccacctccttgcggtggaagatgccagccgcgagggcagcgtcgcagttcgtcttctcgaagacctccgtgaagtgctccggcttgccagcaccgctggacgcgaccacggggatacgcacagacttcttcacgagcgcgatcagatccaggtcgtagccagccttctggccgtccatatccacgcagttgagcagcagttcaccagcaccaagagcctcaaccgcctgggccagctgcaccacgtcaatgtcacgggcctcgcgtccaccacgcaccgtcatctggtaccagcagtactcctcgccgttcgggccaggcttggacagcttcacgacgttgtggcccttggcgttctcatcatagaacgacgccacgtacactcgcttcgggtccatggacaccacgacagcttggttgccgtacaccgcggagatggtctcaatggagctggtgccgtcacccttgccgccgttagcgtagtacttctccgctgtgtacacggcatcgctaccaatggacaccttgtcagcacccgagcggaagtacagcgccgccacatccagagccgagtgggtcttcagctggtcgtccacgtactcgcggataccgccgccaatcgtaaggggcacgaagacgcactccgagctggcctcaagcactcgaaccatcggcaggtcgcccatcggctgctcgcggaagctggtgatgttgaggaaggccacctcgtctgcgccctcgtcgaagtagcgcttgcacagatccacgggtttgcccatgttgcgcacgtcgccctcggcattgtcctcacggacgtcgtactggtctcccttggtcaccaccaggtctccttggtcattggcacgcacgtccaggcatctgcattcaataacccagtcaatacaacactttagctccacaataacccaatccaaaatctcccgacgtacgcgatgacacgcttcgacagcgtcgtacggggagccgtggccgccgaggcgatgggggtgtcgtggtccgccaacgccgtgttctccaggaagcccttgaggatggcaatacccaccaccccactcttctccgggtggaactgcgtggccatgacgttgcccttctgcacggcgctgacgaactcgaggtctccgtagttggtggtggtgagcacccagcccgcgttcttgtccgtcttgatgacgcgaaacgagtgcacgaagtagaccttggcctcctccgtgctcacgggcagggacgcgaacagcgacgacttcttccaggccgtgatgccgttccagcccatgtgcggcaccgtcacctgctcggacgggaagcgcgccaccttgcccttgatcacgcccaggcccttgagctcggggcactcctccgatccctcgaacagcgtctgcatgcccaggcagatgcccatgaagcgccggtccgccgcgatgtacgccttgagctcgtccacgtagccgctggcgttcaggaactccatggcggcgcggaagttgcccacgcccgggaagatgagcaccccggcgttgcggatgtcctcggccgaggtcacatccttcaccgagtggccggtcgcgcggatggcgttcttcaggctgcgcacgttgccggcgccgtagtccagcaccgtcacctccaccatttatcctaacctatgagtcgcttggggatgttgaaagtgtgtgggggaggacgttgaggcggattggcggcgtgtcgttggctaaaaagcagggatctaacggcgatgattggctggaacgggtgaacccatgtctagagcgtgcagaaaaatctcgtggggaacacggtttgcgacattgtacaacttagtgtggtgcacaccatgagcgacgtcaccgggcaacgtcacccatttcagtctgcttgggtgcaagtacccgtcgtctgctcgtgttgaacctttaccatcgtgcggttgtcccgagcattatttcgtccgcagaggccggggatcaacacgaacgagtgagagttggcgtcaagccgggtggaggctgcggctggagctcgcgtatgacgcccggatctctacgcgcgactaccggtagatagcgggcaatggctccaggcgacaagcgagcacccgccacctgacagccatcgatcgtctggcatttacatgtgtagccactcttgtgatactcctgccaacagtagaggttcttatccgacctggtcaacatgaaagattcggccaccactttgaggtgcgcacgcctcgacgagacctctacgctacagtacgtgtagatccccacatgtcctgctctcggatgctccatcacttccgacgcctctcactttgcattttacctcgacccgaccaaccaattcactccaaacaccaacacaccatgaagctcaccgccttcctcgtgaccttccttgccgtcgctggagccgcccaggccggcaaccccgagaatgtagcgcagagctcgacatcgcacagcggccacgccgatgtcgttggcgcaacccccgcgcccacaacgttcgcggacgtaccgacccccgctccgaccaacttcagcgacccgactccagctcccacgttccccacggcagcgccgactgttagcgcggatttggcgcccacgccagctcccacgacgtcgtccggcagcgaggacgcgactcagtcagagcgcgaatccactggcatagtcggccaggcgtactcgaccacaggagctgttggtgttgcctacgctacaacgcgctccgagtatgaggccactaagagctccactggtgactccagcagcggtcttactgtgccgatcgcggcgggtgttggctgcttgcttgttgtgctcggcgcggtggctgctgctgtgatcattcgcaagcgcaagaacacggcggaagaagccgaaatcgactactcggacgcgatccacacgcctgctgtgtctgctgtgtaaggaggaaggacgaacaagatggggctgtttgtcgagctgtggaggatcgaactcagcagtgacaacgacaagaagtacccgcgatagttttgggctctgatgccgccgtgacgtttgatgttcatgttagctgtcttgagtacagtataagtgttgatggtttgaagaagtgttctccacgaacgagtggagttccgaagtcgttagatggcaagcgtctacgtagcaataatctgttccaaattgtaagaacgtactgagctgttctctatgtgtggtgtatcttgcttttaatattcttcctttggagaacaatggtggcgtaaagaaagcaaactggcggatttgctgccgaacggcgtagtttcctcaagattaagctcagtataacagaagtacaggcatacgaacggattgttaattgtgcttcgttgttgctagtgctgccttagagcttggtcgatcaacgcgttttcgatgcgttcttggtagccgcggagactccctccaacgttaccaattacgaactggacgaccgaccggacatggcgcgagtcgtatacaacaccaggatcatagtcgaatgagattcgcacgtacagttgtaacagcgagagctcgtgctctggagtggagtctgaaaaccgcttggttagagcgtactctcgtgcgtggtacaccagtccatcaagtggtttgtgcttgatctcgacgggcgtcacgcttgacacgaagaggatcatgtcacgatcagggtcgacaatgcgctgcacgatctgctttgcttttacatctgctcgcgagttgttggagaacatttctttcgtaaagtcctcgataatagtgtacggctggtcgagattctatagcgtatcaacaataccacacgttagacaggcatccacacacctcctgtctagaattggcttggcccactcaccttggctgctttctcatacaatccgccgttgtcgaagtgcttttccactcccttgaagtggttccatgcagcctcacccgtatctcggagactgaatggcagtagtttgttggcaaatatctcgatgtacttgccatcgacaccttctcgaacgtggacgtcattcgtcgggatctccatacttgctagtccactagctgcaaacacggcgtccacttcgtgatacgcacactggagatgctggaaaaggtcgtggaagtcaccaatgtcgccttggaagtcgagtacacaagttgtacgtcgctcagtgcaaagttggcctttgccacgcgagcattcggctccctattacaaaggtcagctacatgtgagaatcatggacacagtttcttcacccattaccaaataacttgtacctgttgagtaagtcgcttgcgcagcagcgcgctcagccccgtggccatcttccgcttccgctcaacaatcagccgcaagcgtacattttctttttgagcatcatcccgccgccgtcgctgacgcatcgccatgtctttccaaacgcgcggagcttggaccaatgacctcggaacggataaggcagctgacagatctccactcgacgacggcggtgcattgagctgcaacttcctcaactgcagctccagctctgcaactttctctcggaggtaggccaactcgtattgggcctcgtcacgaactcgattcgggttggtcgggaccttcttggctttggaggacttcggtcttgctggaggctcatccgttgtgggaagactcagttggagccccgaagagtggttcccgttccgtagcgtcttcatactgaagggcaccattgcagacgattctctacagttgatggtgaacgtcggccctccgtttaacaccgccgccgggtttggctcatgcttgactcgaggaagctccggcgacggccacagtgacccagaggatagaggaaatgttgctggcgttgaggtcggggacagcgcgtcgagggaatagtcgtccacgaagctcagcgccgcctcgaatgcccgctcatcgtccacgtctggcaggaacgccatcgctacgcccgcaatttgtgatttgtgacttgcagagaccggtgccgatcaaaatcgcaattttcgactgcagctggaatacggcagctacagacagacacgtacttgcaatgcccgtgaacaacgcaccaggcactgcttggcaagcagcacaggagaattattatggttgcacagctgctgcaacttacgccggttgtccactgtcgatggacagtgcgctcaagtcgagaagtgaaggcaagtttggtgcaaacattttgccttgcaccgatacacagtcaatcgagttgaagctcccgttcaacgggccgttgacaaagcaatcatccctcagttcattaccggccatctgagttgctcactgtttggggtcgagcggccacgttcgagttcttgtggctcctgtttgaagttgccgtgtgttctgaattggtcccatgatgatgcgggccagctgtcacaaatcacaaaacacccgctagaagacctggacgacgctcgcgtgctcgaggcggcgctgggcttcgtggatgaatgcctgctcgacaattcagccaccatcaatgcctcaactacagcagagtcaagatcgttaaccagcagagtcaagatcgttaaccgacggctcagttcaccagcgcgtagcgccggtggagagtcaagacgttccgtctcaaatggcggaccatcgtttgctatcgactgcctcgagacatcgacgatgatcccgttccagaacatgaagaggctgcgggtgaatgccagaactgcaggctttgaccggcatttgctgtcgcacagaggcgattcgcgtcagaagaagacgaatccaaatcgagtacgcgacgaagctcagtttgagttggtctacctgcgtgacaaagtgagcgagctcgagtcgaaactgcgcgcacttcagctgagttcaccagcggtagaggcaggcgtgtcggtgtcttcttcgccgagtccgttgactcgaatgcctcaagtatgggagggaatggcgggtcgtcagagccgccatcgtgagcaagccgagcacgagaacgcgcgcctgaaagtgttggtggagcgcaagcaaaagatggtggttaccctgtgcgaggcgttgcagaagcgattcattgaccaggtaaggaacgggagtgcgggcgctgcatactcaatgctaagtgttcctttgcgttttagaatgccaaatactgccgcggcgttgacgcaaagcagccctctattcaagtagtggatttccatggagacatcggagactttcaggacctaattcaacgtcttgaggctgcatatcaggagcaagaccgcgtgtttgtaacgaacggactcgcaaacgttcaattcccgacggatgttgttcagatacgcgaagtcgatgacaagcaagttgagatttttgcgagcaaactgctaccttttagtctacaggacgtgggcgaggctgcgtgggaccacttcaagggcatcgagaagcacctgggcaacggtggactgtacgggaagtccatgaaggtaagcttcactaaactccagtgctcacgggacatacaacacatcaaactgactgactgactgcatgcacactggctgctccacagaacctggaccatcctttcaccattattgagtactttacgaaggaattttactcgaaaaacttgcgagcggatgtgcaggcgaagcagatcgtccggcgctgcgtggaagcagaccgggacatgatcgtgttcgtgtcgagcatgacgcccatcgagatcaagcacaaggccgtcagcggactggtctaccacgctcaagagtacgcactgacaaggcgacttccagatgcctcagtcgggcaagatctgtccctgcttcagctctgcacccgcttctcgatcgagtgtgagccgggcgtcaagttcgacgctcggtacctccgctctgtcgcgcggttctggatcggcaacatcgctggcaacctccgctgctacctagaccgaatcgagaatgccctcgtcgaccaggcactcagaagaagaagacaagagctataactcacattacaggatgcactaacttcaaacttcagtaacctttgtaaagaagaagtcacacgtcgactaaaaacgcactgtacacgtcccatactgaactcaagtgagtgatttccacagggttcacgtactgtactctctacacgacataattacaacgggcaggtaggtaggtatttggacccgcgcattcccagctatggccttcctggaggacgaggaggacatgcgcgccttcgaggcgacgctcaacttcctggaggaattctccaccgactcgctgcagccgccggcgctcccgccgctcgtggacaactcggacgcctcgagttccgtggcgttccgactgtcggacgtgctgccatcggagctcgtggcccccgacgcctctagcgcgcaggcctcgaccgccatgcctctggccatggcggagcagctcgcggggccaactggaccaacgttcagcatcggaacgtcgacggcagcggagtcccagccgcccaagcagcgcaagccgaacagacccaggaaacctcaggccaatccgaaccgcgttcggaacgagctccgcttcgagctgacttacctccgcgagaaggtgtcgcagctggagcaggagctgagctcgctgcagctgcagccgagagtgaagttgctgagcaatggacaggctggggaggtgtcgagcttgcaggtttcgagttcgcctcacgtgttgtctgcctggaagggggtagctgggcgacagagacagaggagggaagatgcggagcgagagaacgctcgactgaggctcattgtcgagcgccagaggaaggtggccatcgatttgagcgaattactgcggaaacgagtaaatattcggagggagggcagaatatggtcatttggtcgatgcgtttagctgtactgtggcgtttttgtcgatgtagatgaatgagtgcacgcacgtgagcgatccgtacgcctcggagcgtcgtttggctcgtgtgattgacttccacggagacattggggagttccaggaactgttccagcaccttgaagacgcctaccatgaagtcgacgacgtgcttctggcgaacggcctggcgaccatggatctccccacccacgatgtgcatattcgtgaaggggttggtggcaaataccttgaattcttcgcgaacaaggcaatgccattcggccaagctgcgacttctgaggctgcgtgggaccacttcaagggggtggacaaacactggagcaacggtgggttgtatgaaaaggcaaccaaggtaagtttcgcaagtgctttgcactttatttgatgctgtaaatattaatgcggatttaatgtcctactcgcaatagaatctcgaccagacctacacggtccttgaagacttcaccaaggaaatgttctccaacaactttaaggcagacatgcagctgaagcagatcgttcgacgctatgtggaggtagaccgcgacatcatcgtgttcgtgtccaaagtctcccctattgagatcaagaacaaggcaatcgccggtttgacctaccaccttcgcggctacgtcgtcaccaaacgctctccaatcgcgggcactgggcaggatctctcgctgctgcagttctgctcgcgtatctcctttgacaaggagccgggtgtgtcatacaacgccaaccacattcgtgctcttaccaggtttttgattggcaacacggtgggtaatatccgatgctaccaagagcggattgagaatgctttggtagatggagctctaaggcaggcgacagttgcagcagtaagcttatggtgaaataaatgttcgtggcaaggtttttactgtaagaagtccagctgaggagttgaaaataaatgatcagagcgtactctcggaaatgccaagatagacccgtttgattctcctttcgtattctcgggccgtgggggggggacgacgctgtagcgatgaagttaaaggaggtacgagatatcgagaaggcatccacccgcgaagcccaggggcacgttcagcaagcggcctcctcgtcctgtaagaacacccacggcccgttgcgtttagattgtacgatcatcagtccaaagtgtttgcgaactggaaacgccgagatcacgatgaaaagggacgagcccatcgaggtcagtgttaagatgtagtctccccttttctagtgcttggatggctcgatgattctcacgccgatacaagacgttacgctttactacatcatcattgagagtacacaatcaccgacttggcaatcgccgtgactcataatcagagtgctgaaagtgggaggcaaaatacgccgagccaagcaatgggaatgccaacaatgctgagcctgtgtctttatcatttcctgaacagaaaagcgcagagcacagcaggcaccattcagtgtcctcgggcagtcctacttgttaatacgatcagaggctttcagaaactctctctctctctctctctctctcggcctgtccgtagctcttgtgttcaattcccgatcgaccgaatcttggacaaccttctcaccacgactgagaatttcacgatgggccctgcatcatcgatataaacctgcgagggggatgtgcaagcgcagcatatcgctcgacaccagatcgcaacgcggtcctctcttgtcaaatgctgtactgtacctctacagaagcgcagagacgtagcccaatctggtcaaaccactccaccatcgactttatcagagatctaactccaagcgggagtgcttcgcccagttgcaccctctcagtccagcgcgcagcttagagatcatccttgtcacgttggcgatatcggagctagagaatacgccgtaacgtccattatatttgacgctcgacaacaagaaaatgactgtgagcgataggaggcctctagctttacggacgcaatgcatttgtccatgactcagcgctctcgacttcgtctacaggtgggagcccccctttctacgccaacgctctctgccttctgcttggccaatattctggctatgtcccgagcggagccacaaccacaattcagcgctagaagaccaatcgactggaaatggagcttatgggggacaccgacgacgacatgcgcgccttcgaggccacgctgagcttcgtggaggagtacgcgagcgacgcgctgtcgtccaacgagctgccctcgctgtccgtgagctcggacgtgtccaactcgttctcgctgcggctggcggacgagatccctccggagctgctgcccattggcgtctcgccgtcgtccgcgtcctcccccgcctcgtccgtcgccaccgtcgactccgcggctgcggggcacctgtccgcaatgaacctgaccgcaatgacaccccaccacgccgctccggccgccacccaagccgccaaacccaagaaatcgactagaaaaaggaaaccccaggccaacccgaaccgggcgcgcaacgagctgcgcttcgagctggccttcctccgggagaaggtcacgcagctgcaacaagagctgcaagcgctgcagccggagtcggagccggagaacaatctgctgtgccaaggagagcactcgacggcgctggcgacggtcggaggagccgcgcgtcggtcgcgtccgtcgtctcaagtgctgtgtgcctggaagggcgtggccgatcgacagcgacgccgacgtgaagactcggagagagaaaacgcgcggctcaggatgacggtggagcaccaacggaaggtcgcgattgacctgagcaagctgctgcgcaagcgagtgagttgctggttgtggttaaagtgtgatgatgcagaaggatactcacgttgttgatgttgctgtttgtagatggctgagtgtgcggacgcgcaggacccgagcgtcaaggagaacaggttcacgcgcgtgctggacttccatggcgacatgggcgagtatcaggagctgttccagattctagaggacgcgtaccaggacttggattctgtgctggaagagactggccttgccacgatgaacatccccactgaggacgtacacatccgtgagggagttggaggcaaatatctcgagttctttgccaacaaagtgctgccgtttggacttgaagacacaaccgcggctgcttgggaccatttcaaaggagtcgagaagcactgcgggaacggcgagctgtatgagaaggcggccatggtaagtttgcagtgactgaccacgcggtggtaagatacgtcgatgacctgacgatttatacttgaaatgcaccagaacctcgaccagccctacacaatcatcgaagacttcacaaaagaagtgtactcgaacagctctcgagcagacatgcagatgaagcagatcgttcgacggtatgttgagccggaccgagatgtggtcattttcgtgtgtcgagttaatcctattgagatcaagcacaaggccatcgccggcctgacgtaccacctgcgcggctacgtggtcaccaaaaaatccccagcgtctacgccagagcacgagctgtctatgctgcagttctgctctcgcatctcaatcgataaagagcctggcgtgacatacgaccctgttcacgtgcgagcgctgagcaggtttttgatcggcaacacggcggggaacctccggtgctaccaagagcgtatcgagaacgctcttgtagatcaagccttacgacgacagatgagttctccaggcagcgagtgatatatagcagaatgcttaggttcagtcagtgcctactaaattttacacaacgacaaatagagtcacaccttgcatcacgacgcgagcgtgcccatcagtgatataacatcccagtgaacggcagtgatgcaagaaggagctaggccgacattgggtaacagcagatacgagatatgcaaagctcaagagcgttgccctctttgccagtcgcagcacgaacctcaagatcacctttactcgtgagaacgcgagcttaaagaaacccttattttcaacagaaggggatggccacgcagatacaaactgtcgctgaagttgttttctgccccacgcttcatactactgaagtgtgcccttcgtagttaaattaacccaacgcaaacaatcaagatctacagcaatcaattcattcactaaccattcaatgctaaagcgccatcccaatagtacttcaaccaaatctgtgcggtcggtcgccgcccttcgtggcgtaccgcaagctggtagtgtacatgtacgttgaaaaaaacgacgacgctgtaccatctccgttgactagataaaacttgcagcagaatttgacgagtttttttttctacggcaatcatcctagatcactgtcgcgatagcgcgcggtcaacgagggcattctcaattctctcctgatagcaacgaatgttgccgacagtattcccaaccagaaatcggatggcagctcgagtgtgatccggatcatactccatgccaggcactttgtcgatcgaaatacgcgaacagaactgcagcatcgacaggtcatggtcaggaacagacaaaggggattttttcgtgaccacgtagcctctcaggtggtatgtcagtccagggatcgccctgtgcttgatctcagtgggagctacacttgacacaaacacgataatgtcgcgctctgcctccacataacgccgaacgatttgcttcgctttcatatctgcacgagagttgttcgagtataactccttggtgaattcttcgataattgtatagggttgatcaagactctgatgcgttaccaagcacataatagcaagtaagcaacgttagaaacaccaaacgttggatctactgtagaatgaatagcaatatcgatgctcaccttggccatttttcgtagatcccgccatttccgcagtgcttctcgacgcccttgaagtggtcccatccagcctctgctgtatcgcgcatcccgaacggcatgaccttgttcgaaaagaactccaagtatttcccatccacgcctcctcgaatgtggacatcgttggtaggtatctccatagtcgccaggccgttagcttccagcactgcatctatctcagcgtaagccgcttcaaggtgaccaaacaagtcgcgaaaggcgccaatgtcgccgtggaaatccaacacgagacagagttggttgtctcctgcatttggcttcttgacatacgagcactcggcggcctgcaacatctgacaaaatacaactcacattagtatggacgtattgctgcccagcagcaatacggagggaagacgcactcgtttccgcaataaattggccaagtcgaccgcggtcttcctctgtcgctccacaatgagcttcaagcgcgtgttctcacgctctgcatcctcgcgccgcttcctctgccgacccgcgattcctttccaggcgtcacgctcctgatatgaccctccatgagggacaatcaccaccgttggggacggcgtcgtctcttgatgaacgatagtagaagctccattgattcgagacttgttctgcatagaagctaactcctgctccaattgcgccgccttctctcgcaaataggccaactcgaaccgaagttcgttccgaactcgattcggattggcttgggccttcctgggtctcgtgggctttcgtgttatagtatcaggctggacacgctgaggttctgtagacgccgtgaaagccatcggcgatggcaaagtctcagttggggcatgaactggggttggtcgtggaatggagaggccaagagctccgaaggtattgtgtccgtcggtagctgcccacaggaggatgtgaagctcgcaatgcttggtgtgagctctggtagccccacagacgcgaaggtgccgactgcgcattcctctataaagctaagtgtcgcctcgaaggcgtcagcgtccatctcgtccgccattacgtctccggttctgtcggtttcgtactgaattcactgaatcaccttgacgcgattatcgaaaaaacagccaatcagaacgcgcgctgagattacctcaacgacagcgatgtctaactttaaggttacgcttactgttggagcgacttcgacgatacagtagcgtgaactgtagcgatcaaaaactgcccggacttcctatcgtccaggcttggttaatatttagtcctctttcaatcgctatctcgaccaaacgctacatcaaacgctactcacatggaaacatccactgcaccgtcacgaaacctacagcacctgcaagggcggagtcaattggcggttcacttggtaatgtccaggcttcacgaccggttcgacctggtagtaaatcgtatcgtcctcgggagtgcgcggggtcgacagtttgttctcagccctcttcttgacgacggcgacggcggcaactgccacgacacaggcggcagcagcggcggcgaggagccccggcgtcgacgtacccgacgacgcagtgttggtgttggtgctgtcgtcttttttcgaagcggaatcccccgccctcgtcaccgcagacatcgtggtgcctctgtagctgccgccggtggagacatccccgacgatgcggttctcgtccgtggccgagaatgccgtgttctggaagttcgttgccggtgcggggggagcggccgtcgtcaccgccgagcgctcttcgttcacgaagttgccgcctgcaatgccgttgcccggttgcactccagcgttggcgttgacgtctccgatgacgttgaccggctgcactccagtgttggcgttgttgatgtcgctgccggggcgcacatagtctgctccaatgggcgaggccatcgccaatgcaatggcggacacgatcatcatccaggagctcctcatttcaacgggaaaaaaggttgtacgcgcgtatgacggtaggaactgaaagctcgaggcttggtccttcgggaggcaaatgcagaatgggcaagacagcttcgatgcaaactatgctcgtgatatattcggtaaaggacatcggatggcctcgccattgaccagggtggtcaatgccccaggcgaaaaatgtggtcacttggagtcgtgtgtcgaggataagtcccgccagctgctgcttaccaactacaaggactgtccttcgaatatacgttatgacaggtattcagtcaattccgttgtaccgttctacgaataattgctggtatgttttccagaaggtatgtattcctagaggaatacaggcgatttgtgaaggtggcggagatatagcccgaatcgatccagagccacaagccgcagttcccatgcctttcgccctacgtctgcctgccatcactttgcgtctacagacggcgatcgtagaagcaaaggtaatcccgctccaagccttggatcgtggtgcttggagccccaacacctctcattggtcgaaaaggtgcatatccaatatcgcccattttcagccaatgccagcgcgttatgctattgggagggcgcgctttccagccaaagattccgccgacccgagctaatcgcagcacccctcgacgctagaatggccgcccccgcgacgatcgcgcgccccacgggcgagaccctgcgcggcaagcagaaggagaaggacgtgcgcatgtccaacatcatcgccgccaaaggtgcgcgcttgcaaatgccattccagacagccacgcgtcaattcaacgttttatattcaaactaaacaattattttattttattgtattgtatctgcgcagccatcgcgaacgccatccgcacgagcctgggcccgcgcggcatggacaagatgatccagcagggcaacggcgaggtgatcatctcgaacgacggcgccacgatcctgagccagatgcaggtgtaccaccccacggccaagatgctcgtggacctgtccaagtcgcaggacatcgaggccggcgacggcaccaccagcgtctgcgtcattgccggcgcgctgctgagcgcctgtgaggacctcctgatgaagggcatccaccccaccaacatctcggaggcgttcggccttgcggctgttaaggccgaggagatcctcacggagatggccaagcccgtggagctgaccaaccgcgaggaactcattaactgcgtcaacacgtcgctgtcgtccaaggttatctctgagtacgcggaccgcctgtcgcctatcgctgtggacgctgtgctcaaggtcattgacatcgctacggccaccaacgtggacctgaacacggtgcgcgtggtcaagcagctgggcggcaccattgacgactcggagctcgtggacggcctcgtgttcagcaagggcttcgacaagacggcgagcggcacggcccccacgacgttcgagaacgccaagatcgcgctcatccagttctgcctgtcggcgcccaaggccgacatggagagcaacgtggtcatcaacgactacgccgccatggaccgcatcctgcgcgaggagcgcaagtacatcctgaacctgtgcaagaaggtcaagaagtcgggcgccaacgtgctgctgatccagaagagcatcctgcgcgacgccaccaacgacctgtcgctccacttcctggccaagatgggcatccgcgtcatcacggacatcgagcgcaacgacatcgagcacatcgccacgacgctgggctgcctgcccgtggctaacattgagtacctgactccggagaagctcggtacggccggcctggtgcaggaggagacggtgggcggccacaaggtcgtcaagatcacggagatcgtcaacccgggcaagaccgtgtccatcctggtgcgcggatccaacaagctggtgctggaggaggccgaccgctcgctgcacgacgccctgtgcgtcgtgcgctcgctggtcaagaagcgctttctgatctgcggcggcggcgcgcccgagatccaggtggcccagaagctggctgcctacggccacacgctggagggcacggccagctactgcctgcagtctttcgccgacgccatggaggtggtgccgtacacactcgcagagaacgccgggctgcacccgatcggcatcgtcacggagctgcgcgccaagcacgcgcagggccacacgagcatgggcatcaacgtgcgcaagggcaccattagtgatatgtatgagctcaacgtgctgcagccgctgctggtcaacacgagcgagattacgctggccaccgagtgcgtgcgcatgatcctcaagattgacgacatcgtcatggtccggtaaataggtagctgctgatggacgggctgctctccgtttagctagggagaacggctcgtgtttcgaggtggtgagtggctgaggacagtcttaagtcagggttgtatcgagacagaaagcaaccaacaggctgtctcccagcgttcaccacctcgaaactttcttaacaagtactattggattggcatcgtttgtttacactcgactacgcccatgtcttactccttgttcttgttctccttgccgcccttgagccagcacgtgcctcccttctgctccttccacgtgaaggccttgcatcctccagtggccttgcaaacggcacagcacttatcagaagacttgacagccatcgagacaccgtgaggctccgctacgtcgtcttccagcgcagggcagcttgaagcggacttgagcgctcccgacaccgcaccactcttggttgtgatcgttcctttgccgctcttgagccagcacgtcccgctgttgtcgttggtccacgtaaacgcaacgcagccattcatgctgaagcagattgagcggcatccgtccgcagaggagctgtacgacttgccaatgtcctcaccctggaagtccaaatccttttccagagtcgagcaagtgtcgtcgatactgccttcatttgacgcaatgtagctctgcgcctggtcagcagcctcacggccaatgtacatgacgaacccgtacggattcactgtgctctccttcatggcactggcgtcggcgacaaacacgttcttgagacccacgacacgcagcttttcatccgcgcagcgttccatgtcgctggcatcacttgacgcgtagcaggtgccgccgaagaagtaggagatgtagctgtcggtggacgcaacaaagtcggcaatggcggccggatccgatccggtgtcggagatgaaagtcgctccctggtcttcgaggacgtggaccattttctggacgtacgactgcatcgctgcaaggtcgcgaggtgtgccgaagtaagcgtccccctcgttgaaagcgcgccagtctccgttgccgtcgaacccagggtgcgctcgagattcagggtttgtcacgtacattgcaatcgtgaaggcgttctctttctggccaagttcaccaaagccgtgcgtgaggacatttgactggaaatcgtacgtacggccttgaacgtcgtagctctcgtagctgataagtgtcgggcctgcaccggcccaaggtccggtgtgactttggttcatgtactggtcaatggcctctggaggcgtgttgtcgaagatgaaggatttcatctctgggtgcgagaacgacacgtacatgaggttcgcgtcgaacaagttgcgcccaacgttggggtttgacactcgcccagcgccctgagcaatgccattgaagccaccgaccatttcaagcaggtcaagctgagagtttggaccgactccgctctggattaacaccttgggcgttccaagagcaccagccgccatcaagaccgcaccacgcgcgcttacgcgcacctcgtactctccgttgtagaccactccagtagctttcccattcttgtcacgcaccaagtagtcgactttggcttcggttagcagcacaacgttgcttcgactgttcatcggtccccaaaatgcggcagctggggaatcacgctgtccattcctaatcgtgaagggagggtgaccgaaggtcttgtgcttgttgtttcgagcgtcagggtcgttgagctttcgttccgagtaacccagtgactgcagcgccttggagacgagggagtagccttcttgagtgtaccatttcccatcaggagaaggaacgtccgtgtggccgtgcatcttctcgttctcgtccatcttggcgttcatctgagacgctgggaatggccactgcgactggttcgtgtacacatcaggcggacggaagtaagtcgccgagttgatggacgaacacccgcccacggtcttgccgagccacatgtaggcgtccgagatccactcgacgcggtactgctcgttgtccgggttgtacatgatgaggtcgtactggccgggaatgtcaaacttggtcaggccactccccttggcgtagtcgggtgcatcggtgccgcctgtagctgccatggacttgggcccggcttccaggatcagtacagacacgtttgggtcccgcgacaagtactcggcagctacgatgcccccagggccgctaccaaccaccaccacatcgaatgtaccagcatcggctttgacgatcgagctggctgaagttagtgcaagtgaagcacacaccacaacgctggcgacacgcatcaaagggtgcttgaaacttgcaactggggtgagagcttgagcgtagatttcgaagtgggtcgtgaacggagccgattaccagtgttgtggcagaggttgaagtcaacacgagctgccgtctaggtacatacacgtacgtacagctgactcgtgtctcccgctttgcttggcccgaagtgtcggcatgcggaagcaactgggcagctggtgcggtaagccgagccagcggatactggagcaaatagtgtgttagttgaaatgcaggcacatttgaagctctggagcagtttacccgatatttttaaggcaagcatgaggagcgcaacttgataagtaagttgaagcacacgctcaacacgtttgcacaatgcagactacgatagcaaagggacgattactttataatataaacagtgtcaggctgcgctacggacaagactccgtcttcgcgcgcggtgttccgttggatcggcgcaatatcattgttcacctagtaaattacgcgtcggcatattacaccgacggcttgccgggcaagtggttgatgttgttgagcgccatggcgtggtacgtctgcgtcgcgtggtcgaagtcgatgacattgacgcacgtgttgtcctggtggatctcggtcatgcggttcagctcgccgtgcagcatctgagccagcacgatcttgttgaagcggccgtgcgtgaccatcagcacctgctccttgggcggcgtgttgctcaccacctccgtgatcttggagacgccgcgcgccacaacgtccagcggactctcgcctccgggccacgcggcgttgaactcgccctgctcccacctcttgaacatggtgttgatctggtcctcgtgcatctccatggggtggccttccagctgcccaaagttcatctcctccacctcgccgaacgactgcacctcgatcttcgggtggagctgcgccacggtgtccgcggtctggaaggcgcgcttgagcgcgctgctgtagattgccgtgagcggcacgtccttcatggccttggccaggctcttggcctgctccagaccctcggcgttcagcggcatgttaacgccgcgaccttgaagcttgcgctgcatgttgtagtctgcagaaggattaacacattaacgggttaacgtccgatgcacaatggtccttttcaatactgtagctaggtgctcacctgtctggccgtgtcgacataggtacagtctggagcatccttcggccacgggcggcagttgctgagcgacactgggggctctgttctcgccgtcgtcgagcaggtcgaattgaagctggaagtcggccgagtgctggcggtgcggaggcatgttggctgagaagtggcgacttcgtagacggcacgaagggcgaggcaggcggcggcgtagagcggcaagcgatatggtggcccgggtgcgcggcacgacgctaaagtctgaataacgcatagggagctgctgctggcagcatgattgcatcctcaagctcgaggatgaacggccaagagacggtcgcccagtatgtgacactgtgcagctcgcctttgcttgctgggccggaggacggggggcgcgattatacatggcgctaggtctccagtactgtggaggcagctacccaatcgttgggtgaaacgaccaactggggccaatgatgctgcgtcacgaccaacgcgccatgaggcgacttccgccgagtccgccctcgcgacccgagcggcgagcgctgcaatcgcacgacaccacaagaattttgacgcgtgcgaagatcgcaacgtcaaatgggtacgggcgccgttgcgtcgcgcactttggcgagtgccaacgcgttggcagctccatgcagtgccgacttgtttgcgatgtaagcacggcagcagtaacgagttgcacgtggtgtcaacgctcaacggcaactttgtaatactgtggtcggcaaaatactaaaaaaatcacattacagcctcattatacccgagttgtcggatgcggagagcccgctgttactcctgcgcgctttgttatgcctcttcttggccagcacgagccccgcgatggcgatcacgcagcacgtcgcgccgacgatgatgttgagcgctgcgcttggagactggaccaacttctcgatctgcgactcgttcgatgtggttttcggggtcgtggccgacaaagccacctggtggttgttggacgacgctgtggaaagtgaagcagcagcagcagcagcggcgttggacggcgtcgcgctgctgtcgttgtgtgtggatgggaaaacgcactcccaatgactggcggaggcgagcacgcagtgcgcatcgaccggtgccacgcaacgtgacgcgtaattcagggacgactcgaggcagttcgcgatcgcggcagttcccttggtcgggcacgtgccccacgctggtgttgacgacccatcggccacgctgccgcacacgggtcccatgatgcagtaagtggcgccgcctctgacgccgacacgagagcatggcacttcgctttcgtcgccaatgtcgtccgcgaacgtgacgagcttacggggggacggcatcattcaggtcacgggtcagttcctgattcgatgtgaggtcgtggactgagagcgctcgctgccctctggtcccgctttgagatccggtctccctccctccacacatgttcacgcggaccagaaccaccacgcgcagaccaagaacaagccctgctgccacatgacgtcccagtgtattacaaaaacaccgcgtacagcgaacgctcacgtcaaaactgacttggggaagctcggctccagctcaactgcaaggtgaggtgtgtgaagacgagctggaagagttcgcacttgtggcaagttgccactggcaacgtcgaggttcgaagaggagagcgccatcgaagccccggcgcctcctgagcgccatgctcttctcgtcaccatcttcggagctttggccatttgcgcgtgcgagaaaatgacccccacctgactcagacgtcgagactttcgaaactctagcactacacacgctgttacctaaggaaaccgaagctaatcggactcgaggtctggtcgaggtgacgttcgagttggcctggccctaaaatgaggtgctgcaggcagtgcagttggagtaggagttttaagctccttgcagcaaagagggagtttgtccgtggtgggtgtaagatcaactcaataactccacgcctgcagaagaatcgcggtcgacggggcaactgattgggcaaagaatataattgtcactatggcatttgctggagtacgggtgagccttggctcgtgttgtcgctgtaattcttttgaaagctaagacgattatatacttgtacgtggactggatctaaggtgaggcattttcgcttcaaggcgaacccgctgttattgtcttcgctcgttggtcgtcggggcatgaaagttgtgttacaaccggaacctatcaaaacatacagcttttcatggagcgaaggctatctccctaaagggcaagcatcaccgaagagtattccctatatgatctatcgatcctcaaaatggtttgagcgttcatgaaccaacttccaacacccatcagtaacttgtggtatacatgtacagtagtgcatgtaacatgaatagatgggcttaggggatttaaactctgggtagagtggtgccaatgcccacagtagttaaaaaaatgtgtctctagcgcggaagaccgcgccttggaaccggtccctgcaactcggacagtagcacaatttcgaaactgtgcgtgattatgaagtttgttgcttacggtgataaccgccaattggtaatttacagtcctgtgccgtgtcagtgtccaacgcgtccaatgccattcgtacactcatagttacctcatttccacttcttaaaggccctgcgaaactgagaggaaaaagagggacaatgaacctcttcggggctgatcaaggctctattgcgtcgctagaggagactctctctttcatcgattcattggagtgggggggggggaagaagagggagcacagatcagcattgacagcccaagcacaaactccgattcctgtagtgcaccaacaacacacagcgcgccatttcagagtgctagtgatccctcgccgaatcgagacgaccttaccgaaatgctccatgaagtcatcaagagacccccgaagaagcggcgaggaaaagggaaaaggaagaggtgcaccctgagctcctcaacgcgactgcagcaacagaagaaggcggagatactgtttctgcggaagcgatcgcaggaaatggaggaatatatcacgcaactgaaaggggcgtcaagtttaagcgaatcgaccaaagctcagtatcgtgcaaggatccagtcccaagaaatgaaccgcatcctaagaaaactcctctcgaaccaagcacagctaattgaatcgctgaaaatgaccgtgtacaacaagcgtattttccaggtgagtttggtaccatttttaccaaatttgacagacattttgctgattcacttcgtttcttctgtttttcattcaggagatgcagttcgtgtgtggtctgtcaccagtggttcgcggtgattttgttgcaatcggcaacgaaagtgcgatcaggagtgatctagagcacaagacgtcgagtttgtatctggattcaatctcgatattccagccaccgccattgccgtcactctaccactcaactcacgtcagcgtcgacagccagcagcacaagacactggttgagattgtcaccactacacccgttccttgctccatggacaccgtaagcgagttggtgtggaaggaactgcacaacaatcgtcagtatccggacaaatggtaccaaactgtaagtagttctgcgttttgaagcgttaaccgcccgactgacttggtgaatttgagtcagaatcctggaaaccgcgccaacacgatggagaaaaagtatgtcatttcagtgaggaactacgctcaagagttcaagctgagcgggatgcagttcatgtgcagattcgacgagccctctcggatcgtattcgttggggctgacacgatgctcattgggacgaagggtctgcagttctccaatcatacgtggattgtggtgacgccttcgccgaccgacccggttcgctcgtctgtcgttcacatgtgcgtgcggctatcggtggaccgagtggagggaggttctacctatacagaagacaggagctacgcgcacgacctggttctcaccgacttgtgcgctcgattccgtcagcactcgctgtacgttcagaactggatagtcgacgaaaccgagcgcttggcagcaggcatgcccacaacattggcttagagggtcttcacacttcgttttaatttgttaaaagtagtgttcatgttatgaatgttaacaacaacctacacgacttatatcgacgctccgagcttgctgtttactagaccaccgctctacactcagtggtaaaaaggataacgatgaggtttatcccctgcggagcgcagccttgctgcctgtagtctggacgccgaccttgccgttcgtcgtctgggcaccagtgttggattcgctgctgaggctcgtcgttccgtcggtgctgctgctgctgatagtggacgacttccagacgttcgcggcggtgtagttggcgagcagctgcgagcagttggtcatcttgacgggcgtggacacgagctccgactcgaaggccgtggcgtccgtcttgggggcgttcacctcgaactcctggttctcgaggtagcagcacacgaagtcgtggaagtggttgtaggcagcgatacgctcgagcgagctcatcttggccgtgcgcttgaacgtgccgaagatgagctggcgcacctgctcgggcgagctcaggcacaggtcgcgcgaagagaagaccgggcggaactcgggcgggatctggcacgtgtccaaagcctggatctggtccacggtcaccacagtgctgttggtggtcgagttgccaccgttggccagctcgccggcagtgttcacgatggacgtgaccaggggcgtgacgatgtagatcgggtcgtcaatagcgtggatgaacatcaaaaccgaaaggaggacgttcgagatgacgttgctcatggtaccgaagatggcctcaacgccggccatgaggccaccgatgactgcgaagccgccaccgatcatcagaacagtctccgccgtgaactcggacgggtggtgggtaatgtgcagcagcagaccgccgcccatgttctcggccgtctccttggggtcctccttcatgagcccccacagcgccttgatgttggtgccgaactccttgaagaaggtggccacctgcttgacgcccacgagcgggttgcggatggtgttgatgatccactcgatggcgtcggccagcatctgcgccatggcgatgaccgtgtcggccgtgtagtcgacgaagcccgtgatcgcgttcttgatgcgctgcttgagcggcaggttcttgttcatctccttcttctgcctgcgctcgatcttgaagtagtcccacagcgtgttgttcgggtggctcagcaggtaggccgacatggcggcgtcggcggcgttggccttgagctcatcgtccgaaaggttctcctgctcctccgtgaactcgacgacaacggggcagacgttgtacacgtcgttggtgctgccactcgaggagaaggcgagcagagagctgttcgacgagggcgcggggctctgcgccgcgcacacgcaggccaggaggacgaggaggagactggagtgccacatgcgaccgaggaggtgaattgaattgtgagatggagggacgacgaatccgagtggctctagtcgatgcaggagggggacatcctagtgagtcttcgcaagtttgcggtggttggtggcgttcgtggcccgaggatatccgaccttggagcaaatctgacaggcaggtctgatcgcctattgcatctgggaaggaggaaccccatgcatagtccacctccatgagcatgtacatactttgacgaatggcgttacagcaaccatatgacgacaacacgacagaaattaaatcaaccacaaggcctaaagcaaccctaaaaccagctggcacccggtaatttattttaaatgacgcgtaaatgacagggacacgtcgccctcgtcatggtcttgctacatatatctctaaatttagacacgtcgtggtggcgtctaactgatgttctcgacacagcaatacgtgaaacacatgacaatatgtgtcccacattttcaacactaagcagattttgagcgacagcaaaaatggagaagaaatcgctggcacatgagctggtgcgcgcgagaatcgccgagattgcactcctcaagaagaagctggatgagcttaccgagcatctggaaaagcttctggcagcgcagctacaaatccaagccctcgtggaagatcgcgaagagaacagctatgcgttaggagccgtcttgggcgatgaaggggtcgaccaaggtggtctcaccgcagaggacgacgctgtttccctcgatgttctactggagctggcggtgcgaaaaatgaaagactaatgcagcatagactctgtatttaaaggtaaatacagactgtggtgtttctcagagctggttctgtagctgctgatgaatctggccagctttagcgacgtcgcgttcagagagatgacgttcttggaagtaacacatgatgacccacaacattttcgatcgcatcacattgacgtcgttcttggaaattctagaaagttgcatctgcaagttccccgtaagatagctgtgggcttgggctactaccattacaccacagctagcaaaatcaggttgttgaggggcacagatccactcaatcggatcgaagaaaagatggccacgggggtcagaagccttgtgccaccgctccacataaccacgaagcccctcctttccttcattttctttgtctttcggaattccagtccacacgatttccatttcatggtgatagtcatcatcaatgagcggctcgtacatgtaaacatgcacccgaagcttgcttgtttttgccgtgtagcgtaggcgaaggataattacgtccatgagcgtcatagtccccattgcctccacggggtccagaatggagtctgagacaggttcagatacatcttcttcttgcttgctatcttcagcagattctgtagaactcggttggggggcagggttgacacggttgagccctatgtcgatcgtttccttccaggcacttagcgcttggtagaagtctgcactagacaaatctgacaggtgttccaatagcggttccagcatcgcttttgcgtatgcgtatttttcacctgaagacaatacaacctggtttgcccgttcacctcgccgtagccgtacgtacgcaacttgcttcctagctttggttggcgaagcgttaccccccgcagcataaagtggttgttctggttcagccccagtgtcgttcggcaactttactttcggcaaccataacttggacatctgcacaattggctgtaacatttccgctgcagccgtcaattcgtttttcacttccaaggtctggtacgtactccaccgatcatgaattgccatagctggaagcagtttgaagccatgcccctcgtgtgctaagtgcataagatgacgacatggtaaatggtgactgctataaaatagacaagtacacgtccactccacatcgtgacagcgaaaggtttgattcccgcaataaattttccattgtgaaggactcgacgctgtacgctcacaagtcgcatcagccatgaagttcacaaatcgttcccactcttttcttactttctcgaagatgtcagggtacagtcgagttgctaccgtccggagaaacttcggtatggttttaggaacgcgcgaagtcgaatggtgctgcgcgatgacgaacccgatctgctgagttatcatgatttgatgctgcaccaagcccgcaatagtcttgtcaattcgtgtcttgtgccccaacagtattttcacttgatgccagtttgactcgatcctgttcgttgtagtattcccagccgtgaaaaatttgctgcgagcaaagttcgcccacatgtctcgacacgaattccagttcttttcaaagtacgagaataaagcttgtttcttgttgtcttcgcagtattgcttcaatgcaccgtaactagaatcgtaacctgtctctgtggagctgcatatggtttgttttccaaagttagcgttaccacaagaatcataaatagaacctgttgggtacctgtacagcgtttttatcatcaggttgagtaactcgtcgcgttcagacaccttcagcttgtatggggcccgctgcatcaccttcttccagtacgaaatggcatggaattgacaaagtaaaactttcgcagcagggaatagtgttttcagcaccctccactcaacgaaatctttgtcgatcacgatggaggatatcatccgccaacttgggttcttctcttggaaatactccaggattgttgtcatcatcggagctcgttggttgaggcatatgaagtctacaactgggaaccctctaccagtagcggttgtgacgaccagactccctgaaatatccaacacacaacagtagaaaatcactttgttaataaggttgctatatcatcgatatggttgctataactacgcaaggttgccgtaacaaagataaagtcgctataccgaacaactcatatgatagcccaaactgttcgtgccgtgagtgaaatccatcgtaagagtgtcgccccagcgctcgaacatcaacttctgcacctttgtttgcatcacgataccgcatgtcacgtccatttggtcttgaataacaaggacgtcactaccgtctaactggcggatagcttgcagcatgtctttcaaacgggcctccgctgcgtcgtgccccataatactgcggatcagattacgggtctgttgaggtgttattttgcagcctagcaaacacacaaagcgcgaacagtaacgtaagtatcacttcagcatatcatatataaaactacgcaccgattccctcattcaggaagttcgtgatgtgcttggaagaaacactagcatccgttaaagtcttaacatcttcgagatcttgctcgtccaacggaagtgtctttgttgtcaggtacaacgatgcttgcgttcgggtggtcgggtgcgtgtgggtaaagttctgattatcaacagcgacatgtaagaaatactaacaaagcaaacaaatacacgaaaaggcagatacctcgtttcttatgacaattctaaatttgccattttccatccgctgaacggttggtgtcatgcgtgcaggacacctgcaatagttgccttttctattgcgatgtcccttggagcgcgacgcttgcgaaacaccgtgtgtacagcggaggaccttgtgactccaattaaaacgtgaagggatttggtcccgatgattggtgcatatgaaagggggtttcgttaataacttaaatttctcatcaaacagaggtcacacatacctgttgtactgatttcgtgtctccgagcttcgtactcgaaacttgaggtggtgcttctgcttgtatattttcaagtgtgcgttgaacttgctccaactcttgataatcgctggggtaaagggcggaacggggttgatagtttcttcgcgctcctcgttgatctcccgcaactcgtcgaggtgcttgcttgatcgcttccgcggtatgtactgcttgttccgcttggataaacgtggggccgaatcagcgtcgacagactcgtgaagctgcagctccgccttacgcgttttcgcgaaagattgggcttcatccccagcagaaagcttgcatttggccagagcggtatctatcgattccaaagtgaatgtcaatattaatgatagcgcaacctttttgcttaaagcaactttaacgagaatacctggtgttttcttgcgtgctatggctttctttctcggcttggggctctgtttgcgtgtcctgcgttctaaacaaactaaaaaaatacacaatacattatcagttcaactcaataagtatcaataataatccaaacgagtcttacccgcttctgcttcgtcttctgtgctggattctccgtcgtcgtcggcctcctgttcatcgtcactcgcctcctcttcatcgtcgtcaccctcctcttcatcgctatcgctctcctcgtcatcatcgacctcttcttcgtcttcctcctcttggtagcaatcctccgcctcttcgtcgccgttgtcttcctcatcctcctcatccagaacaaagtcttcgtcttcgtcgtcgtctttttcaatcccgagagcggcgtacatgtagtttagctcctcgtttacgttacgcagctttcggcctaaacaatacataccgacataatccaaacaaaatgtgaggcacgtagatactctcgttgccaccaacatggagaatactgattaccgtttataatggctccccccgcaggagccatcggtcccccctcgccgtttggtgcttgactgattcgcgagaggtgcgtgccccacgtggcctccgttcagcagcgcgattccgaggtggcgcacttaatggcatcgtacctaattagaagcgcactttagcgtgatttgcgtacctaagggcttaatggtaatttagacttttaaattacgctcgtaatttttgaaatccctaaaagcaaccatgcatgtctcagaatggctaaaagcaaccatacttatggttgctctaaccactcactttgaccgctgtgtcggtgttgaagcctgcagacgtgtattactgaagtgcatacaggatcagattccaaagtggtgtttgttagtcctgtcaacctcagctgtaataaccttaccttgacctccttaaccttatcccacctccaaactcactggactttctaaactttcgctttaacctccttaacgacactacggtacctcaagctggctcgattggagtctgaagtggtcgacctggacgatcaacgagcaccgttccccactgacgcgctgaataatagcgcctcgcacatgtcgatagtgtttcttcagcaaactggcgtctgtccactgttgcctacgagaacatctagcctcctgccacgctgacaaggcttcgttaagccgaaggctagacgttctcgttttatatgaacgcgggtacagaggtgcagaggcacaggttcaggtgtgacccaccaccgtcttaaagagctacgatcgacgttaatagcggcactcgcatcctccgcaacttggacagatcgctgtagtcatcgatacatgtttgtacttctgaagtaaatggatggaaaggtacaatattgttttactactacactgtagaagttcacattattggtagatcaaacggtgaggcttagaaatctgtcctgcaatatgctgcgttcgtgcaggctggaagctgcagccacgcccaaggtactgtacgcccactaccagctccgagcccgagttggctctcgagttggctgggagtttggtcccggctttttccattatactgagttttgtaaaggggaagttagggaggttaggaaggtgagattaaccttaccttaacctgtgggaggttggaggtgtgtaaggtaaggttgacaggactagggtttgtcacgattgtggggcgaaagtgcacataaaacttcattagtccggctagcggcgtcgaaatgtctactgtttgccgatctcaaaagtatcttgagcgctgtcattggagcgaagcagcgtgccttgagggcgcgagtgagatctccaaagggcaatggctctcgaggctgcatccgcacgcgccgactagaaattggcggtggcgtgcccgcgaccgcagtcgtccaaacagaaaaatgccttggaaccgaacttctgaaggtgcccaactcatcttcatgcggtggtcgtggtgtccgcaacgcgggcgctgtcgtctgcaccgcctgcagcctgcagacaccaccaccacggacgcatgaaccggcttgggagctgatcgtgaactgtattgatgtacagtacatgtagcagctatcggtcagtgaacgtcgttggttggtggacaactttgacagaacgtcccggtacatgcacataccgaggtgagaccagccactggttgtcatgtagtgcaagcacttcacttttgtagtcgctgcactacatgtacaattttggattggggtacatttgtacagtagtccaagcgaaacgacaagtccacaaactaaaagtcaatacatgaagcttcttcttgttgttgcacaatagtccaaaggaaatccctcgagggtcaacaccgtcgcgttggcaacaaaactggcgcagttctgcatcctgcagctgaagcgctttgtgaagcccagtggcgttctcttcatcgcaccaagcaggaacgaggtttgtgatccctgtgtgtcatcgacaacaaactcgagcttgacatcgagacggttcccgaccagatcgtgcagttccgacggcggcgcgcgcacaattccgactacattagtcgccggcgcaaagcacaatacctcgctccttggcaaatggagactgccctccctgcccgcttggcgtcgcgccttgctccaatgaaatcactttggtcgagatgcggcagccgcccccggatcggcgagcggggtcgcgcgtggatttctagtgcttgatgggcgtattttagtcagaatagtcaaagttaatcttcaggaagatcgccatggcacctccaccttcaacatacagtgggtgaaatcctcattgaccagctgagtagcgtctagccatccattcacttttgttgtgtgccatggtcatacttcgccgcgtattgttgatgcgcttaactgtcttcctgagtccttcgggtggaggttccagtacgactgaagagattgtcattcccaaagtttcctcctactgcccagtcccagtccccatcgttccgaagcgatgattcaaacgggtcacgctgtcgccgtcgccttcgcgctcaatatcgctgccggagccgccaccattctcggtggcatggtcgtcttcagccagcgcctcgtgtacctggccaaccccgtcagtctggcggttgctctcagcatctcgtccggtgtcatgatgttcatctcgctcgtcgagatcttcggagagtccgtccacctgctcacggaaggccttcgcaccgacaacatgtccgaggaaaccgctacgggccacggctggctcggtgcgacggcatgcttcggcgtcggcatcgcgctgatctacgtcatcgacgtcattgtgcacaagatttcgcccgagcacgagatgacggagatcgagaacctcgaagacgtccgcgagtccatccgtcacttcgagagcagcaagatggcggccaacaagacctcgacaccgtatctggaggctggtccttccacgtgcgtggatcctactacccagtacgtcaagatggacgagaacgccaagcgcgcactacagcgcatgggtgtgctcagcgctctggccatcggaatccacaacttgcctgagggtatcgccacctacgtggcagccatccagaactcctctgtcggcttctcgctcgctgtcggcatcggtctgcacaacatccccgagggcattgctgtggctgcccccatctacttcgccacgggctcccgttggcgcggaattatgtggtgcgccatctccgcgggtgccgagcccattggcggactcatcgcttggctggccgtcggtgacggtatggaccccatgtcggagggcattctgttcggtatcgtctgtggcatcatggtctgcatctgcgtcaaggagctcatcccgacgtcctacaagtttgccaaggagaagacgcacatcgtgtccatcggcatgttcgctggcatgttcatcatggttgccagtctgacgctcttcggttacgctggcgtgtaagaatctatggccgagacgagcagtgcgttataagctcgactcctaccttttttttaatcaaagttgatcaatttcaacgaactatcggatatttggtggtaattctacttggttattgagatccatggattaaacatgctctctcgtttctgagacagcaaagttaggcgccaggtactacttagtagtacttaatttgttcttgtcaccttttgcttcgctcgctgacaggtagggcgagcgcttggcacctggatttcctcgggtaaccagactgtacactaagcaacccaacgtgtacatgcagtactgcttgttcaaccgtcgatccaattccgtggcacgtcaaagcaacaaatgcgttaggtttcctggccaagtaatctgaaggtgccacacaatgagcgaccacagcggacggcaattatgatgtcgcggaaaccaatcaataagttgcaatagctgaagtttcgcatgcctccgatgtctaaccttgtcgtgtacttgttcgggacggtgcagcctggacagggtgttggacacgatcaagtgaaactttcctaccttcctggaaagtggatgtttcgaatcgcgacaactggacagagagcacagtacagaaggtggcgccttagagggacggcatataactgatcacctctaataactaatatcaattcatagggttgcatactaattctctatacccaacccccaatactcaaatccccgtctatgatgaatatatcaggtgtctctctaaggcgccaccctctgtacatgtattggtcaacaacacagcccaataattccagggttcggtatgattatgcatgttacatgtttacgctcattgtctcgattaacaagagtgctgttgaactgatcaagtggcacaagttatgccggagtcgcccccctccagttccggatttgggaaattctacacagagtgatgagcttcttgctaagcgacaaggaccaattcgccactttgggggaggtgctcgcgtttatcgactcgttagggttcgatgagagcgacttggcattcgacactaacccgctgcctcacagcactcgagacagcggcggcgtctcgcctaaagttgtcggggtgatacagctcaagactaccaaaacgaagaagagaaaggggcacaacttgagctcatcgacaaggctgcagcagtgcaagaaggctgaaatcctctatcttcgcaagcgcgtgctggagctggaacaacaaacgcaggcgctaaagggtcagcgcgaacgtccattcaaccagcttcctcaagacaagcccagcgccgattgcattgcgatagcccccaacacaacgtggcgagagttggtcgaagcgaattacagcgcgagacagcgcgctgaagaagagaaccgcgcgctaaaaagctcctggccaaccagcttcaatcgagcggggtggtgagtgcgcttctccagcagcaagctgcacttcaggtgagtttagtaccaggagttttgactttgactgcagcgatttgaaccaacacgatggtttctaccaatactgaaagcatgacggcggaatcgctacattttgccaagaattaggctgacctgcgacgtgagttaccgcacagaagaattcaaaacgtcatctaacaaaaaaccattagaaatagcgtctgttattcacgatccacgttcatgaatttcatcacaacgcgcaacacctttcgagtggattcagtgtttacaaattgataaagcgcagcgagctcaaacggactttatccttggaacccaaagaatgacgagccaacgaattggttgaaaggagcttaaaacgggtgcggtcgtgacaatctcaaccagtgtcttgtgcactaacttgaattgagctatagagtgatggcaatggcgatgactggaatatcaaaattcacttcagatacaaaatcgacatcttgtgttctagatcactccttcgttgccgattgcaacaacatatccgcgaactattggcgacagaccgcacacaaactgcatctcctggataaaaaaaaacaaaaagaaacgaagtgaatcagcaaaatgaaaattcgttgaaaatggtaccaaactcgcaggttggaagatacgctgattctccacggtctttttcagtgagtcccttagctgcgtttgttccacgaggagtttcctgaaggtgcggtttatttctcgggactgggtgagctttagtcgcggattcgcttaaactcatgttgccttcgatatagtcccccatctcctgcgattctgcaagtacaaaatctccgccttcttctgtcgcgttgacgaattgaggaactcaacgcgtcaacacgcaccgctgcctttttggttctgggtagtcgtaggcgggagaagtaatgacacgcccttgaagcaaactgctgagccctaactatgatacttcttcaagttgtcgatcttagtttagcttaaagtgcttgctggcacaaggagctacacatgcatatgggtggcctgcttgtgtatgggagctcgttagctgctcccgcgtcggcacgttcatagactattacgtggtatttgatgaatcgttgcaaatgcccgtagattttattgcacatatactcgtttgtactttgagaaggatgtcgtgcatgttggatgccgtgcgttgagcgagttgagcaccagaatttcctccgataactactcgtgtggcttcggtcaagcaatccgaaggtgttccacacgccatacttcaccgagtcatgtgatgtcgcagaagccgagttacaatggaaccagcttatttctgtggtctctgcgtggctgacttgttgtttacttggtttgtggcaggtgctggacaaggtgtaggacaggatcaagtaaacctcgctcggggatagaatatgtaagataggacgaacatccttagtaaatgatagaatcgcggcaactgaatagtctggggacacgccggaaatcaattgataccgtgagagtgtattttaatccttaagtaagtgtcttcaagtaagtgcaacccaacggaagcgccgtgttcaacatgaagcaaatccccacgactcggcttgattacatgcggttgcttcgacgaacaacgaaggcctgttgattatctgatcaaatgacaccaaggttgcgtcggtcggacagccagcttctcttcatttcccgatttgatagactctgtccaaagtgatgagcttcttgcttagcgacaaggaccaattcgccactttgggggaggtgctcgcattcatcgactcattagagttcagtgagagtgacgcagggtgtaacccgctgccccacatcaatcgaaacggcggcgtgtcgcctacgaatgtggatatgctacagcacgcgactatcaagcgtaagaagagaaagaggcgcaacttgagctcatcgacgaggctgcagcagtgcaagaaggcagagatcctctatctccgcaagcgcgtactcgagctggaacagcagacgcggacgctgaagggtcagtgcgaacgtccattcgatcagcttcctcaagacaagacacgcgcccatggtatcgcgatagcccccaacacaacgtggcgagagttggccgaagcgaattacagcgcaagactgcgagccgaagaggagaaccgcgctctgaagaagctcctggccagccaagttcaagcgacggaagcggtaagcgcgctcctgcagcagcagactatacttcaggtgaggttaacaccaagagttttgggtttggactgctgcaatttgaactaatacgatggtttgtttccaatacttactgcaagcagggcgtcggggtagctcatttagcgccgtgatgcataaactcaatcggttcaaaccatttcgcctttgagggttctctgttgagtgcccgatcatttgtgttcgcaacaccactcactgcgccttcaaaggtcgcagtgcactaaccggcatccgtgaaggatcgcacgcggatcctaagttataatcgacctccgctccagtcgccgccatgaagctcaagcgattcctgctgcgctattacccgccgggcatcatcctcgagtatgagctgcgcgacggcacccgcgagatgaaggagatcgacctgctgcacctcacggccgagtacgcagcagcaaagtatctttgcatgatcagcctccagactgacagtatactaatgtggtgggccaggtcggatatcgaggtgctggtgaaccagatcgtgttcgaggagccgctgatctccgagtcccggaagccgcagcttcgccgtctcatttacagtgagtgagcggtcgaaaacagcttcatttgaagtgtatttaccaactgaccgcttttgtgtggctagaactcattgagaagctcgaggtcaacgacagcaacgacttttacctgttcaagatcttgcgggcccacatcctgccgctgaccaactgcgccttcaacaagtcgggggacaagtatgcacacaatccccttcttttcgtgagtaaatggagttgagaattgagcttgacctttgttgcgccttcaggttcattactggcagctatgatcggacgtgcaaagtctgggatacccagacgggagacgaattgctgacactggaaggacacaagaatgtcgtctacgccatcgccttcaataatccctacgggtaagtactcacttacttgtccagtacctcccatcgaagctaacgcagcgatcttgtgtgaattttacagcgacaagatcatcacggggtcctttgacaagacgtgcaaactctggagcgccgagactgggcagctttaccacacgttccgcggccactcgacggagatcgtgtgcttggcgttcaatcctcagggaaccgtcatcggcacgggctcgatggacaacacagcgaagctctgggacgtcgagaccggccaggagctgcacacgctgttcggccacacggccgagatcgtgagtctcaacttcgacacgcagggcgagcgcatcatcacgggctcgttcgatcacacggtcaaagtatgggacgtccgaagcggccgctgcatccacacgctcgccggtcaccacggcgagatctcgagcacgcagttcaactacacgggcgagctgtgcatcagcggctccatcgaccgcacgtgcaagatctgggacgtcgcctcgggccaaaacgtgcagactctgcgcggccacaacgacgagatcctggacgtgagcttcaacgccacaggctccaagctcgtgacagcgtccgcggacggcacgtctcgcatctacaacaccatgacgggggcctgccaggccatcttgatcggccacgaggccgagatctccaaggtctgcttcaacccgcaaggctccaaggtgctcacagccagtagcgacaaggtagcgcgactctgggaggtcgagaccggcgactgcctgcagatgctcgagggccacacggacgagatcttcagctgcgccttcaactacgaaggcgacacaatcatcacaggtacagacagacacacagctccatccacccttcattgtttcaccagaacactcacccccaaccttgtcttgcgttctcttctcctcccacaggctccaaggacaacacgtgccggatctggaagtgctaagcctttcatgcctcccatgactcctcgaccactatcaacctgacacaacagacaataagcagagaggaaagacaccaattgatgctaaaaaagagagaagaaagagagagagttaagagaacaaaaagagacagaaagccagccagccagtcaactcaactgcgtctggctggcatctgcccaacctaaaattcatcttcggccagtgagtcgcactcaatttctcctccttctagcgagtcttggacagctctctcgctctaaaactccgctggaacttcggtcctttgaggcgcctcgctgcactgacgtcgctctacatcgggggctcggcgggcgccgcgaacgggttgataatctgcatcagactgcgacagccacagaattatttaatgttagcactattgacacattcttatcgagaggttccgtcatgctgagagacaacgtacgtgaggcccggctcctgcttgagcgcgatgtacacgaccagcggcacgaagccccagtgcacgatgggcttgatggtcttgaacaccttggtgggcgccgtcttccagagcttgttcgccgccatggtctctcttcgcgattgggttggcgtcagcgactgggcggggagcgaggcccccctcaacaagcaactgtgatgtaccgtggctgctctctttttaaggcggcttcatacaaatcacaagggattggtagggaatgtttaagagagtagcgcactctattgagcaactagtacacaaacttgttttaactaaggatagacagtactgtgagtgttggcaagaaggtttataactgatatccttttaaataaaatagtgtacaaatcaaatcgtacaaaatgttttttgatacgtttttgtgttttcgtcaaaaagcaaaacaaaaatgcaacgttgaagtttgcatatacttttggctgcattcgatcagtgcgcaggggattttggcggtgggcggtgtggcgttgacggctgtgggtccacggcaaagcggcggaagcgagcttcgatgaagcccaccttggcgcttggcagaccgaagcgatccatctgcgtggatcaacgacaaaaggtgaattgtgttccccagatcgtaatgtccaagacacataataatgcagcgtacatggtggggcatcataatgaagtttacgtcttcaggtggcgtgggtctggaagtggggctgtaagctcccgggccgacagtttcctgtgtagcacttgttaggatagggaagtttggcgtgttgtggaccattgcagcctcctacattataggcaagtgcaagatgaccgagttaagttaaacacagttgtgccctgcaatactgaaagaggacacgtacggatgataagcggctcgctcgtgactgcatcgcggagcatttgaagcttgagctcgcgacggctgcgctcactgagaactgcatttttcaacaaccaaaactcgcggttagctctgtaacacaaattgtgaaaaatacaatagcggcgaccaaccttgcatgaagggctgacgtcgtagaaccgatcgggggcatcagcgagcacgcggtgctgctttgaggacacatatcgctctgaaaaaggtacagcacttctctcgtaaggatttatggacgatatctaatagaagcacattgccgagcgtacctgggaacacgtccgatttgaagcgaggggtagtggagagcacgggaccgcgaactttatcaggtgacgagcggccacctcccccggcaccgcgcgggctcatatcaaaatactcgcggtcgcttggcgacgtagggctggcaagcgcaagcaccgcagtgacctgcgcgttggcttcctcaaaccgcgcagccttgcttacataggctggtgtcggaacttgctgtttcttcacgttaatcgcacgccgaggagctcgataagtgccagggcccacggcttgtgggtcggcgtagggctccttcaccacactagcgaaagtagacgaacgatacgctgcagtgctggcgaatcgatctttggtggagctgaacgcacctcggcacgtgttagatccgtcctctacgtgtctgtgaagggtctacaatttgctcactggttaggaggggccagcagaactcaaaaggtacaagcgacatacctttttggatccgcagtccgtgttgtaaacaacgtcgggcacccccgtgagctttcgagctaggaggtgttcagggtccaaaggctggcgctcgctccccgtcgatcgaacttcgcgtgcggaccgcgctttctcctgactgatacggtgcgctgtgcgctgttcgtccttgaggcagtgcttctgatacaacttgcttctgcaggacaaacagcaacatcaactgagctcagccagcctccttcaatgctttcacgctgttcgcttacatgtcgtggatctgttcgcctgagggcagagatatacgcgccatcgcggcgtcaccgccactgccagatctctccctggactgctggttggcaacctgccgcttccacatggcgcggccggaggcgctagatgcctgcagaccggcacggttagtcgcgcatggcatagtcgtcgagacgtccacccacacgtaccccgccgaagacattcgcaggctcgtgggtcatattgaccccagtcggtagctatcgccccgacggagtgctactgcgccgctcgcttttgtcgtcctcaccagcatcagacccaacctcctccatatagctcagctctccaatcttatagtgaagagctaaatgcgtcaccactatttttaccggatcactcactcggaggatgttgaggcacagctcctctcctccacgcttccatttgccgatcccacgcaccgttgagagtcaaatgtgctttacagcagcgacgcgagatgctgtagctgactgccccattgccgcttgactacggcggtgggcatggtggcaatctgctgaacgcgactccagctgaagctgcttggttcggcctggcgttgccatcgtatgaggcggggtgttgcggaaatgtgaagtttgatgtgcgaaattcacgttaaggtttctgaatttccatccgaatgtgcggatcgctcgaagcgtgccatgatgggggcgcatggcaagttgccacgcgctgctgccagagcgcttgctcatgcaatgaatcactgcagtacaatccttggagacagccatgcaggcagggagggctacacagggcgtgcgcgcacgacaaaaacgactgtctggacgctgaaaccgctcgacgtcgaggcaactccggtagttactacatgtccactcacagaccgcggctcgtattataccaatggcatcttaaaaattaagtattttgccggtggtcttgcttagctgtgcacgagtcttcgcgtatgcgcgtgaacgccacgcagctcgattccgccgggccggcggctattcgacactcaggcatgagtcagcagctatgcaggcaagcaggcaggcaggcagacaacctgccggacactctttatttgacggaaacgggggcaggtggcaggcaaccagtgttggcaacgcatcttatactactaccttacttaaatactacgtgcaggtctaagctgccttctcaatcgcgtcctcatctgagctcgccgcgaacgcccttgtctccgtggatctgtcaagtcaactggaggcagacagccagcagtcaggcgtggaggtcgcgtctctaatgctgtatacgctgcccgcttaagctacgctctacaggcgggtctcgtgcgccgcggccatggcgttcttgcgcttccggagccgcaccaagtggcgcgacaggagctgcacgcgcgcgcgcagcgtgctctcgttcaggtagttctcgcgtgacgaggcggtggtgaacatgaggcgctcgatcttgatggcgagctggaaggtcttggagtgccagtcgtagttctcgggtacctgagtgagcacgtcgtggggctggtggttgcgcagcatgctctcgatcaggatcacgtgacgcgaccgcagccggcgcatctcgtcccccgcctgccgccaattgggttcctgaacctgaggcgccccggccacgccggtgctggacatgacgggggcggcggcgcagctaccgccgacactggtgggcatgaccccgaccatcccgagcggcagcccacccgacagagctgccgacactgctgctggagtcaccatcctggccgcgttgttgcgcgccccgccgggaacgcaggcgcctggtacacccgatccgtcaaagtcccgcacggctgcaggatatcgaggcccgttcatggggatgttgggcatcagctctgtgtgttgtgcctgtgcgtgtgggcgctcctgtgcgcggggtttcgagcgaccaccgaaactgaaagtgacggtgccggcaacgtcggaagcctgtggcctgtttgggattgctttagctctctctctctctcttctctcttgggacgactacaacgcgcgggccgcctgtggcacaggcgagcgaggactgctgggcgtcgactgtatctcccaaccgagttttggcgatgtttcttccgagccgggaggaaaagaagtgaagcgcagtgcctggatcgaaagcggtcgggcccccaaccgctatatttcgccgagtcgcaggtgggaggtcacccctacagctcgatactgtttgggttgcgcaccgcctggcgccacggatggcagcgcgcccattgtccggcttgccaggccgcactgcaactcggtgcaatacttttgccgactcggctcaaggttctgctgacgccgccaccatacttggcccaagtgagaccgtctcgagccatagacacgccgaaggcgcctctcgcccggtttcgtatccatgcagccccgagcccgcgattggctcgcggagaccaacaaccctttgcgcgggatgggcgtccaaccacgaaattcacaatacgctttcgggaactttcgatcgctccacttttcctactttacaggaaaaactttccaaaacattgcttgcattgaatcccagcaaacgacgagtgcaggcctcggtatattgacaccgccaccaccactacgccaaggctttcatcgctcgatgtagctggcacagatggtgcggcggtcatatgccaacttttccgagggtttcgtgcaaatctcgcccgacgccttcgaacacatcggcgcccgttgtgttgctgctgcggattcgacttcctaccccaactcctcctggtcgcagcgcgggcagacactttgcgtcaaagcccctcttttagccgcagtttggcgctgcactatccacctgcaaacgcatcttcagtccagtcaccatagaataaccaagacctgacaacagataaaagtacggcagcattggcattttaccaggctagccgccgcggttggtatgttaactctagctcgaaagcttccgtttagacgtctcggcggaggtgatccctcaacatcgaacggaaaatatatctcacatccaacaagcttctattacccactattatttcgagagtagataacttcctatgtctacccttggcaggtaagcatgcacttgtaaccatgtgcgatgaccctgctggccggaccgcggctgcggaatctcggctggttgcgacaaaatgacgaaatcggccggaaaaatcccgtaattgatactctgacattttgccgcctcgaccgccaaaacaagcagtaaattcaagctggcggcagccgcagaattcgttgtcggcagcaaagaactgcacgaggttccgtctcgggcaagcttccatcgcgcgtgtctccgcgccccctgcggcttgcgctctggttcaagccaagacaagccaagcccagccagccagccagttcaacgccccaacgatggttttcttggcgggacacattagcccgcaatcgccggtaaagcaggcgaacaccaccgccaccctgtgcgtgcgtgccctccgtctccgttaaagcggccggggatctccgtacttcgcaacttcgcgacgacgacggtcgagggatcagtttctgaggcaaggccaacctcagcggagtgcactgcttcgagtgcagcgcattgacctgaattcattgtctgcggttgcaaagcacaccaacggaaacaaaacctctaagacttttgctgcgaaaatcgcataaatcgtcatacgccaaacaagtcaaattgtacgaaaggcaaaatttacattaaaatagtacataactacaggtcgagtgtccttgctccccctcgatgcctgggcatccggggcaagcttgcctcgataaataccttcacgcttctccgcgttatgagacggcagcggtgtgcacttggcgacgacatcgtcgcagggtccgctggttgcgacctctcgggcacccgccactgaaacgtaatcccgtcgcgatcgactgcctgcctggcgtccgccgagtccggtttagctcatggacagcgcggcgaagttgtccgagagcatgttcttgcgcttgcgcagctggatgaggttgcgcgacaagttctgcacgcgcagtcgcagcgtgctctcgttcaggtagtcctcgcgcgaggcgaccgtgttgaacatgaggcgctcgatcttgacggccagctggaaggtcttggagtgccagtccacgttctcgggcacctgcgtgagcacgtcgtgtggcgcgtggttgctcagcatctgctcgatcagcacgacgttgcgcgtgcgcaggccctgcacggcgccgtcgttctcgcgccagttggcgctgtagctgctgctcgcggagtatgcgttggggccgaagcccgccggcaccccgaacgctccctggaacgggccagcggggtcggtgggcgccacgccgaagaaaaaggcgcccgagtcctgcttcgccttctgggcggcggcgtcgtcgtcggccgtgcggacaccggggaatgagaacggcccggtagtcattgctgcttggagtgagacttcggtgcggatgcggcagacggagcaaagcgcggaatgccggcggcagcaggtccggggagttgacaaccgcggcgctcggagcttctcgctcgacgcggccaaacccagagtacacgcggagccggggagggattctcctctcttgtggctctggctgcctgcttggaaagcccaaacaagcgcatttccattacacgtgcatgtccgtgcggcgcgggtctcatatccttactgcggggccctgcgattggtccgcaaaaagtcgcgttaaacacggtcatgtgctaattcccggctcttctcttgacaaatcgtcgctcagggcggtggtcgaacttttggcaacgcactcgtgagccgcgtcggagtccgactacagtaccaaccagagacgaggctgcaccgcatcactctattccagtgcacggcagccttcctgccatttttgaggccgcctcattgcgagatgagcgactgcagactgggattgcagatccctacgtgttgaagttgccgcgctatttcttcctctctgggcagataaatcgcgatcgcggctagctaaaaaagtggtctggtgccatggacatggtcctcgcaaggaaatcggccttgttcggctcggcgcgacaagttgtgttttggcattgccaaattggcaatctccgcggcggcttcaagcagggataagctaggggtagggtgcgaattgaagtaaatcacgatgcggcaacgtaaaacgccaggataactctaggaaattaccactctcaccattctattacagcctatctgctgcgaattgcgctattccgtcccatccaccctcctatcaaaccccaccgaacaggaccaacatgcttttaccgatcgagtccgccttgactcaacatgaccatctcggcttggatagccctagtcggcccgcagtcagcacctccgtgagctccggaattgccaatacatatatgtacggtatggcatattcgagcgcgacgcaagctccgggagttaaaccgtttcagggcggcgccccaagcagccgggttgtccagcaaaaacgccttgatctgccgccgatgcggccgctgttggtaaagcagagctgcaggcactgcatgggagcacacatgcgcgagttgggcggaagacgtaatgcagcttggttactcgacccgtggccaccacgtcagcaatcaccggcggcgcgaatgagacccaaggtcaagatcggcttgatgcgtgtacatgtaggtatacatgcatcgctctgcccgcggagcacgaagcaatagtactgcatgtattttatgaatcgttcatttattttagctgtcgtgcagcagaagaatacactagtcgatacctaacttatacttgtacaatgccctagaggcggtggtttggtccttggttgagtcctgagctcactgccgcgcgcgcttcgccacggggacgtggcgaggcaaccgcaggccgaacttggccatgttcttgcgcttgcgcagctcgatgagtcggcgcgagacctgcgccacgcgcgcgcgcagcgtcttctcgtccaggtagctctcgcgcgaggccgcggcctcgaagaggatgcgctccaccttgagcgcgagcgtgaaggtcttggcgctccagttggtgttctgctccacgtgcgtgagcacctcgtgcgggcggtggtggagcagcatgcggtcgatggtgaccacgttcttccagcgctgcgtgcgcaggtcctggccgatctgcagccacgagttgtcgaagtagcgcacgtccgcgtgcgtcggagcgttcacggcggtgatgctcatgactcggtctctcttggtgagtgtgagtgtgtgtgttgtggtggcgagaaattggggaatgcaacaaccaagatgccagccagcgtctgcccccactgcaagctgccgcccgtgtcaaaggagctcgaagtcgcttgagctattcgtgccgcgtgcgtcgctgcgccgagctttgcatcgtttctggcgctacccgcccattggccggcgacttcgactacaccgagcccagagcgagcttccgcgtgcgtgtctagcgcggcgaaggcgcccgaactggctcatggagggggatggcgtgttaaatgcgcccagcgtcgagacgcgcggtcccacaaactgcaatcggcctgagacagcaagggcaagagccaacgcagctccgggcgtttacgtggccggctattgcctccggcatgcagacggcgtaaggccatattggctcacgttgcagcagcaatgacggcagcatctggccgcgacccagtcctacctgttgccgtgctgctcgtaggttatatgctgcgcgtggtggaccggagccgcatttcctgcagcgagcggcggctatcctgccatgcttgccacgcctgcagcgcccccatagttgagcgagtccctattgttggcctgatgcagcggcaaagacgcctccgaaagcgaccatggccttcggcggcagctcccgacagcgttaccgttgggctcaccaggagaactcagcctatgggccgaatcagggccaatagagtttcctccgcgcgcgccgctgccgcgtgctggggacgcattcgtccccatcgccgctgcttggatccaagcccgcagcacttcaggctcaaaaaggcaacttccagttgaagtgcgggggtttcagtcgcgagccgatttttccggaaacggtttcccgattttttgcctaaaaaattggggagtgcggcggcttggtaatgagattgcgggcataccggcaccgctgccgaggatttgcatggtctgccgaagctgggccggccgcgggtcgctcgtggcaagaacggttcttgccggtcgagactctcggatacgaatcgctgccgcgttcgcgcactgcgctcgagcctccacttcggggcgtcgcgaggtcggtctgctgcggttggtatgcgacctccggcacagagaagctcggatagcgcaatacatgttcacacaccgcacaggaggccctgatcaggcaggctgcaggctagcacacagcgaaccaggcctgaagctatcaagcctcggaggaggtgagcttggctacagcgttggccgttgtcttggatatggatctcccgcaaacgcgagttaaacgcccccaagcagtgcaggaaggcctggcctggcagtcgtttgatcgctgctgagactttggcttcggcaccgttcgaggatccagctttttctcgagccgccaaagacacgcacgtctggagaacgcgtgtctaccctcgagtccggacgctgcaagcgcccgctgcgatcgggctgagattttctcgactcgatcgatgcaccggctgcaaagcctggaaactggagctggctggcccgttgaaagaacttcgcccccgatggaacaggggcagcgcttcctgcctgctggttgctgcccggcgcccggcggaaacacacgagcatcgctggtcgagcccctgcaatccattgcatgttgcagtagcccaagacagtactggtgctacatgcacaatgccggcgctgttccagctcgttcggtccagtgctgccgatggcatttgctaagcggtccttgagtgcgaatcgcattgcgacggcagctcgtgccatcttgtttgactgactgcaggctctggctctgcgcggaagtgttgagcaagagatgactgggatgaatgacaaacgttggccttgcttggataggcgctggctaatcgatttaggacttgttgccgttggtcgacttgcaccgtcagcagtgctgactcagcactcgttcaacgagtcgttgcgcaccccacgttgtggtaaggttgcctattatccgttgatgcgcaatggcaagtcggaatacagcacaccgatccaatgcacgacgagtaatccctattcgacgatgactacagactggccatataccaggcagcacaatgtgctgtaagcatttcagacttgcattcgatcttacagcacgtccttcattcccatcgacataaaatacagtgtcaccgacgctaagaatcaaatgatatggcaataggtagctagctgtctttattatcaagccctagctagaagaaagagaacaacgagtaccagcaggttaaccgcgtgcttgctccagcaagtcgcccatttcccagatcataatggcgccttcggagccgacggtgacgatctccttgcggtccggcgagatcttgactgcattgatggcttcgctgtggccgcggccgatggccaccgtctcgccgttgtcgtaatgccacagcttgagcattccgtcgcgtccgccggtggcgaacagcgtgccgctgtgctcaatgtccatggccagcatctcgagctccgcggcctcttccaagaagcgaatggcctcgccgtcgtaggcgtcgaagtaggtgatccttcggtcggagccgcacgtgagcagttgactctcgtccgggtggtagagcacgcggcggaagacggtggacgcgaacatggcctgggtgcgtacgaaggtctcgaggttccacacgatgcaggacccatccgaagacgcgctcacacacgcggtgcagtcttgcaccacttgaattgcgttcacggggccgcggtgctccttgagagacgcctccatggtctgtcgagacggagtaatgcgccacacgcgcacacgtccatccttgccaccggtaattagtctccattcagccgctgaggaggacgacgaagaagatgcggacgaggagaaggacgctggaggacacaccgcgatggccgtcaccgcctcattgtgcgcgtcttggatgacgaacttgagcttgccactctccgggtaaaatgcgcgcactttgccgtcgtcccagccgctcaccacgagtcctccgtcacgtgtgagctctacgcagttgcaaacgaggttgggcacctgtacgcgcagaatttcctgacaacgccgagcgttccagatgcgaatgtccgtcttggcgcacgtgaggaacaagtgcgagttgtccgtcggactgcgcgtggccgagctggggaacacgacgtcgttgatgctgccgtagtggcaggtagagcgaagcaccacgcgcagtcccgtgccactgggggctgcactaccgggacggttgttcgagcgcgacccgttgccaccggagctcgggtcctcagcgagctggaactgatacatgttggagtggttcgttccagcataaaagtcgccgtgttttccttcactcagcgccgtgataccgcccatgagcttctccatacaagccgtagcaataggttgcgtcttggatccgtccgaggccacgctcgcgggtccgagcttcagcactgcaaggtttccgtcccctgcaccgatcaggacaaagcggcggttctcctcattgtcgtgcacgagcagagtgacaactccctggctgaatcgctccttggtggtgcggctgtatcgcggcttgtgcgttccgacgggtgggaacagacaattggggttggtgagatcgcagtcgagcaggatctcgagcaagtcgccggttttggtgccgcagtacgccactttgtcgtccggcgacacgccaatgcacgtcacaatgcgcttgagattccccaggttggcacgcagcgcgtggaacttgcggttcttgatctctacgcgccaaacggtgatcatgtagttgccacccgtgaccaacagttcatcattcgcctcacggttaaacgcagcgactacgagcgtcgagtcgtccccggacggcgtgccgcagattggctcaccattctccatgttccagcacacaagtgcgttgtcgtcctgaccgcccaccgtgaacaggaagctgtccttagcggagaaggccagcgcctgcactttgcccatgtgcagcacgagacggaaggccacgaaattgtcgccacggtcgccgtcaccaccatccgccgacgctgagaggcgcgtggtggcctcagcgaggtcccagacgattacgggggccttgttgcctcgactcttgctctgctgtccggacgcgagcttggagccgtcatttgagatcgccagacacgtgatcacatccgtgtggccgcgaaggaagcactgcgtgttgcgcttgatgtccttgaccacaaccgccagtccgagcgagtagatgaggtacttgccgtccgtcgtgtagatgagcgtgtccgggtacgtgcctgccaccacaattattagtacgcagcgaagcaacggagcaaggggctacgtaccattgtacccgatgacacggcgcagcttgagctgtctggtgtcggccatagcgatggatctagcggccctgtagttgcaggggtgaagtgatcttggagcagtcggtgccaagaggcgacaagacaggggtttcgcttcacagcgaggggacgcagtcacggaatggcagatacatatccatactctattagcctagtagtcgctgttgctggggcgcagcgccttcttgaacttcttgcggaggctgcgcttccgactgaaggcgttctgcagcgtggacgacccggcctcgcggattttgtccagcacgaggctgttctccgaggactcgatgctggacacggttccggttgtgcctgcacgccccgtgcggccgatacggtgcaggtagctcacgacgtcgctggcgaactcgaactggaccacatgggacaccttggtggtgtccaggcctcgcgcggcgatgtccgtgcagatgacgacgaggtccttgtcggcgtcggcttcgctgtcgagtcgcttgaggagctgctggcgctgcggtcggtccacctccttgtggaacaaagcgcagttggccatgcccttctcgctctgcaagaaatcgaacagcgcgtcggcgctcgcgatggaattggtgaagaccagcgtcttctcacctgccgataccccagcctcgtcgttagacgtcaagatctggtgcagcagctcgcaacgcgcgtgctgctcgtccatgaagtcgccggtcgccataaattcttgcaagttatgggcatgcaacgtcaacttcggcagtgtacggtggaaaccctacgaggttaaatgaaagaaaagtcagcaccgaaaaatatacacaccaacctcagtactacactaaacacttccttacgtcagtgatggcgaagaccgtggacgggaacttgtagtcgatgtagtggcgcacagaacgcttgccgtagtcagggatcgtcgcgtaaaggaccacaaaaagaaaacacacacgaagccatctcacacggggttaaggagaacaccaccgggtcactaccaatacacgctaaaacagcacatgcaacatgacaaagaaaacgtagagaggatattgcactgaagacggtctgggtgcggtccgcggagaagtcgtcttcgtcgaagtctcggtccttgtagtcgctgtctgtgcagctattgagctcggcccgcagcagcggctgattgcggatcgtcgcgaggatctgcttggtctccttctcgaagccgccgctcagcagcatgtccgcctcgtcgacgaccaccatctgcgtgaaggcgaagtctcggggcttggtggcgcgcagcagtgcgccgggcgtggcgaacaccagcgggcacgcgcggctgccgtgctgccctagtgtctgtctcgaggacgacaagctcacggcaagccgcgcgagctccgggtcgacctggtgcagcacggcggccagctgccgcacgagttcctgcgacgtggtgagcacgagcgcggtcggcaggcgcatctcgctgggcggcagcgggttgcgacggagctgctccaccacgggcaataggaaggagagcgtcttgccgccgcccgtctcggcggccaccacgacgtcctcgcccgccagaatgggcggaatggccttgcattgggccgaagtgggggtcgtgagtcccaattgcgtcaatcggtcggacaacgcgccgctgagccccagcgagtggaacaagcgagcggcgggctgcgcgacataatgaagctgctgctgtgtgaggctggagcctgcgcgtgctgcttgagcggcacgcgcgccgcggaggtgttgacgcagcgcgagcatgaggacttgcagtctgagactcgtttttgactggcccagttagacagtgctaccccgaaggcaaaacgtggcttccaggtaagaactgcgtgaccatttccgaaaaacttttttttcggaaatggtggggatctgttttaagagggaaagtggacgttccgattttggtcaattggtggatatctgttgcgatccgatgtcttaacatatcataatattggcactacgttttgcttgtcagcgactggaggcagccgttgagtcatagcccgcaagactgcaatagatatccacggtcaagacgccaataagccgttggacgagcaacaggagccacgcgcggcttggtccaaccagcagctcggacgcagtggcatttcgcgtgctgctcactcggccggcaagctcatttttaagcgcagttttacttctgcaggacgtcgagccaccgcccttgaaaatgcgtcagcaagtcctcttggcgccgccgctgccgagcgctgctatgcggtttgctgccctctcttgtaagacgtgatgtcgggttaggctccagctcgtagctgcaggcagcctgcatcgcaagtcgctaccagcgctcgcaaaatcgcgctggcctgccgcgctggaaagcagcagttattcgccgcgccaagcagcgcagcagtgagacgaagtgtctctataaccgatgccccggcatctttgccggcatacgatcgggcgctgtagttgccggatgccacacccgatcgccagattttcaggccgaagcgctggcaagcgtgagcatgcaaggccgattggggccagcgcgctgcaaaggcgatcggcatcggtattggaggggcctgccgagcgatcttggcggggtgtacgtgcggcaagttgaagcggagcgccaaagacgcgggcgactcaagcagcgccggaggcataggctggctcgattccgcgacgtgtctttgccagcagcgcatgctttgcagcgcgaggcttcgctcgagttcgtcagtgcatttggtctgctgtcaccgaccgagctccgttcgcgccaccaaccagcgcgctcgcagcttgctgctgctggcggcgaacgcttgcttagggcatcctggcaacggccgtgtagctcgcgatagaagctgcggcagcacgcgtcgcaatgccggcggcagtggctgaggcggagctctagagaagccaggcaacacggggagccccgccgaagacagccggcggcagcacgctcgccaccccgttgaagttgccgttgggtctcggttgaagcacttactgtagtttaggtcttcgctagcgttcatcgctggccgccatccagccgcaacaggtactattgccctgtacttgagtgatcaagccgcgggaggcagccagacacgcgcgcgtcggattagtaggtatcggacgcacccaagcagcacacagcgccgctctttgtggccttgcttcaagcagcgatcttccagcagaggagttagcgcgttcgagggggtcagactccgccgcagccgcactctaaaacttgttggtgctgggctaaactgctaccgcaccacgcagggtgaggaattgggcagcgttttacggagtaatcccttgcatagcaaaatttgccaacatttcgcttggtccctttttggccatgtcaacatgtagaccaattgcaggtgcaaagctggccgacgtcgcggcggtgatcgggagcggtgccataccattgcattgcttgccagttgccatggctttcgtggtgctgcgccccgcacagactgcacgacgagccgaattaactggaggtgacttcaaccaattttacactcccgagctaagttttacactgtggacacctcgaaatgatcttatttcaccgtgatttagggtcgtcagtgcgaattgctgcaaggcttcccgattgccgaggctcttgccgagagcgctgggcgctggggaaaggggagcaggccgacctgatggcgccaagtccgactgcggtcttcccgctttgagtcaccgagcgacacttgcgagcggcctgcaggcagcagtgcagccaactgcgctgttgtcaccgcgactaccactcgttcacccgagctaatattagccgacggaaggcgcgctagaggcacgtgttgctgcaccaagcccggtgtacccatgcccgaatgcgcggcccgttgcagtcgggcccgtcctgttcctgaagatcgcagtcggggatttgcgagcttcggcttgcttcggcacaaactccggcttcaaaccggagagttcaagtaaagccacaagcggggtcggcgtcgcaggcaaaagttaaccggagcaaggagcaagcaatgcaatcagccctcgccgagtctcctcacgcggcaaacgttcgggtttaggccaacttggcggtgttaaacggcgggagcaattcggagcctaatttggggaccatttcgtcagcgcgtgtctttcgcgtcaaagaacctacccgccgttaaatgccagcgcaggccgtcgcctcatcgcgccggcagcagagtcacgaaatgaattgcgctgaggacgcgtcgcagtttttctggcgcgggtcaaacttcaaaaatacgtttccgacagccaaacgcatttctagctcaggacgctggccgagttccaagcgcgggccacgagctcactatcgattttgcccaattcagccgataacccaaacgctccgttcgtggctcgagtcacttttcgattcggcctccgagacccacattcacctttactcagtcaccacggcgtccaccaacatgatcaaccgcccgggcctcccgggcttccagcgcttcccgctgaacaacaacgcggttgtgccccccgccgtgtccacggcctgcgactggcgcctcaacagcgacgacgagctgcgccgcctgcgctccaactacgtggtcgtgatcgagcgcatgctgcgcaaccaccagccgcacgacgtgctcaaccacgtaccggagaacaccgactggcgctccaagacgttcaagctcgccctcaagatcgagcgcctcatgttcaaggccgccaagtcgcgcgccgactacctggacgaacacaccctgcaccaccgcgtcaagatcctgtgccgctacctggttcgcatccgcatgcgcaagaacgccatggtggagggcgtccccaagcggtgctaggttagattcccccatccagagtcggatcgccgtcatttgtcgagcccccccccccccggtttcaggttcttacccgtgcgacactgctgggtgtcgatggcagaaacgcccacgctgcccatgtagtgtcgcgtttgagtcagtcgcgagtccggaacgaccctcctgccacaagtccgtcgcggcaggacgcctcgtacaggtcgctctgacctgtacacttcgtgcggatcgacagggtggctcacagcagcgagcgccgacatcggatgcagcaagcacgtagtatagtttgctggtatttaccccatacaataattaggctaagatgtattataatttatcacctcccgtttggaaacccaactttcgatccttgtgtaacctgcacgtgctggtggttgactatcgagttgttgttgttggtggtggtggtggtgcttggttcgaagagcatgacggatacaattgttgagaaaggtgatggcgaaggaggatggcgtcgttaaacaggcaatcaatcgcgaggagcaactctttcaccaagcagtccgttttgtaaacaaggggcgccctgcactacatgtaggtacatgtacaatagtcgctcctcccagcagcgcagagcagagcccgcacgacgaacgggatgatgaaagttgtcgttgcatcttggaccgcttagcaaatgccatcggcagcacttgaccgaacgagctggaacagcgccggcattgtacatgcagcaccggtgccgcctggggctactgcaacatgcaatggattgcaggggctcgaccagcgatgctcgtgtgtttccgccgggcgccgggcagcaaccagcaggcaggaagcgctgcccctgttccatcgggggcgaagttctttcaacgggccagccagctccagtttccaggctttgcagccggtgcatcgatcgagtcgagaaaatctcagcccgatcgcagcgggcgcttgcagcgtccggactcgagggtagacacgcgttctccagacgtgcgtgtctttggcggctcgagaaaaagctggatcctcgaacggtgccgaagccaaagtctcagcagcgatcaaacgactgccaggccaggccttcctgcactgcttgggggcgtttaactcgcgtttgcgggagatccatatccaagacaacggccaacgctgtagccaagctcacctcctccgaggcttgatagcttcaggcctggttcgctgtgtgctagcctgcagcctgcctgatcagggcctcctgtgcggtgtgtgaacatgtattgcgctatccgagcttctctgtgccggaggtcgcataccaaccgcagcagaccgacctcgcgacgccccgaagtggaggctcgagcgcagtgcgcgaacgcggcggcgattcgtatccgagagtctcgaccggcaagaaccgttcttgccacgagcgacccgcggccggcccagcttcggcagaccatgcaaatcctcggcagcggtgccggtatgcccgcaatctcattaccaagccgccgcactccccaattttttaggcaaaaaatcgggaaaccgtttccggaaaaatcggctcgcgactgaaacccccgcacttcaactggaagttgcctttttgagcctgaagtgctgcgggcttggatccaagcagcggcgatggggacgaatgcgtccccagcacgcggcagcggcgcgcgcggaggaaactctattggccctgattcggcccataggctgagttctcctggtgagcccaacggtaacgctgtcgggagctgccgccgaaggccatggtcgctttcggaggcgtctttgccgctgcatcaggccaacaatagggactcgctcaactatgggggcgctgcaggcgtggcaagcatggcaggatagccgccgctcgctgcaggaaatgcggctccggtccaccacgcgcagcatataacctacgagcagcacggcaacaggtaggactgggtcgcggccagatgctgccgtcattgctgctgcaacgtgagccaatatggccttacgccgcctgcatgccggaggcaatggccagcaaaatgtagcattgttttcgcagaatggagcttctcccggacttcaatgagctccgtaatgcggattgggtgctcgatctcagaagtcgaaacaaaagatatgagcaaatatttttcgagttcgggcgcttccagcatccgatgctgcatctgtgggttgtttcgttctgacaaaaagcagaggtttcttcgggaagccaaagtaaagcttgggtcgtatgaattgttcatttaatttagctgcaggctgtgcaggccgcattgtgcagcagaagaatacactagtcgatacctaacttatacttgtacaatgccctagaggcggtggtttggtccttggttgagtcctgagctcactgccgcgcgcgcttcgccacggggacgtggcgaggcaaccgcaggccgaacttggccatgttcttgcgcttgcgcagctcgatgagtcggcgcgagacctgcgccacgcgcgcgcgcagcgtcttctcgtccaggtagctctcgcgcgaggccgcggcctcgaagaggatgcgctccaccttgagcgcgagcgtgaaggtcttggcgctccagttggtgttctgctccacgtgcgtgcgcacctcgtgcgggcggtggtggagcagcatgcggtcgatggtgaccacgttcttccagcgctgcgtgcgcaggtcctggccgatctgcagccacgagttgtcgaagtagcgcacgtccgcgtgcgtcggagcgttcacggcggtgatgctcatgactcggtctctcttggtgagtgtgagtgtgtgtgttgtggtggcgagaaattggggaatgcaacaaccaagatgccagccagcgtctgcccccactgcaagctgccgcccgtgtcaaaggagctcgaagtcgcttgagctattcgtgccgcgtgcgtcgctgcgccgagctttgcatcgtttctggcgctacccgcccattggccggcgacttcgactacaccgagcccagagcgagcttccgcgtgcgtgtctagcgcggcgaaggcgcccgaactggctcatggagggggatggcgtgttaaatgcgcccagcgtcgagacgcgcggtcccacaaactgcaatcggcctgagacagcaagggcaagagccaacgcagctccgggcgtttacgtggtagcatcacgtgagcgaaggcttactgtaaaggtatcgtagttgttgtgtgcgtggcaactcaattcgaaaggaaaaaaaagttttttcttgccatttctgcaagccccgcttcaatcgttggtaatacgttgtagctcagttggtagagcgcccgctcgaagacgttttgttgttgccgagctgatgcttcccattgtagcagcatggaaaacctcgttgacacttgggcattgttcatgcgcgttaaataaattactggtggcgttcgcatcgcatttttgacctccgagccgcaccagtaagctcttgtagtattccgctttacgcaaggggatgccggcatcttgcgatctataacgaggaccttaataattattgttgctgcccgctcaagagagcccagctacgagccaagcaacccgtttgcaggggcacccttttgctggcagcgtagacagcgctctccgtccggctttcgcattcgaatcatctcgcacatcatgcaccggcgagcaggcaccgccgctttaacagtggtttgggacgccggagtactggatgcagtagatacaccagcaacagccgcgagcttgactgccgtagccaccatctcactcgacacagacgacggtagcggtgcagccgtggaagagtccgtcgcaatacttgaagaagtcgccgcttttggagaagcagaagctgttgtggtagaccgaacaacggtggaagcagatcccgttggtaagcgtggagagcaggctggagttatcgcgcccaggtcgctgccgtctacatcgataaatgaagtgataacgcagattagtagacgaatcaacacccccccgaacaaaagcatgcaagctcgtaccgctgatgctcatttcctcgcccgggtcactctgttctgcagcatctgccacctcgttgctgctgtttgagtcagtagtcggtatgacagctacagcaggctccttctccgtacgttccacagtgacgggagaagacgatggttctgcagaagactgtggctcgttcgtggtggctggttgctcagtggtagcctgtgcgccggtagctgtggcggcaggttgtggttcagtagagactgctgagtctgacacggagggctgctcggcagaagccgatggctccccgcgtgctggcggtgaagtagtagttggtggccgcccagaggtaggcaatggttcagtagaacccccgccaacacgttcgctactaggttgcaccctagtgctgacgggtggctcgcggcttgagctccgctgctgcctcctgtcactgacttgagttgcctcggagcttcgctcacgcttgacttcacttggacgacgaggacgccgggttcctcggcctgcattcagtagaaaatgtagtgcactcaccgtagccaagcggaaagcctctcgcttctcttcatgactcccacttccgatctccactttcccaaccacaaaattccagtgatggagtcgcgcaccacagaagtagttcgcctgtctcggtagagagatatagcttcccgaccgcttcaaatcgttccacgcccgaaggaaagtgtagctttcgttcgtttgattgccgtagatgcccctgcaatgtttgagagccttctccatttcttcatacatagttagccatgtaagagcctgcgccttcaagcttttaaggacatccatgtgcagcgtaaccgttgacgaaccctgcaacgttagccactcacggccacgcacagtcaccactgctttcgagccctcaaacttcacgcgtaggtcgtgcggttcgcacaatcgctcaattcgttcgacgtacttgatgtaccagttcatcttgcgcggcttcttcgtcacgttcgagatagcatcaagcgaggacgggaacttgtgaataaatatggacagcaactgcggcaaaaaggattcgtggtaggagaacgtcggcgcgtcctcatccagcttgtcgaactcggaggttcttcggtcaccattcccacgtgctgactcacttcgtcgaggacttggcacacgcggtgggagcgggagttcatcacgctggggttctctcctgtacgaaggatcaggcggagacgatgctgggctgaagtgggtatccatcgcgtagtcaaagctacctccatcacgaccactgccggtgccaaatgaagaaggttcctggtggcgaggaggataagggtcacggggtggagggtagctacgcctctcccattgccctgatcctggcgtgtagccattgtccagatattcaccgcggaccgctgatctgtcttgatactccattctaccactttcgccctcgtagtatggttgatggcgtcgaaactgttccgcactgtctggatatggacgacggggatctaaattggcgcttggttctcttggtctcaatgcagacgacgaagaagaaggtggcagtggagcactgtcactccgacgattctcaggcctacctgggtaactcgaagacgggggcactacagggtatgcagaagcacgttcatcaggcaagctacttgagctctccagcgacgatgatcgtgatgggggctggtctcccctctcgagattctgctctttcctatttttccgatagtccgaagccgaaatccgctttattccagacgtcccagtcgctgctgctgtcgacgaagctgtagttgttttagcagcggacgacacggagctggatgctatcgctagatttctcacaggcgatgatgaaggcgtgaccatttgagtacgctgcgttggttgaggcaccagcgggggcaacggcggagcgtgtggaggcagcggcggtagcggcggtggttgtgtcggagctggtggaggtgcttgcgtggcttgcatgggtcttgacgaaacaactggtggagcaacaggagctgtagctgtgggggaagcgaacttggtcggtggccttactcgcggacccgtgggtctcaacgactgtgctgccgttcgattcccgttttgtacgtatcgccctccaccagggaaatttgcctggctcccaacgccaagcgccactaactccacactcgtgctcctcctgattgcctgcgccgttgtcatcttcgtcttcccaggcttggcccgaggaattttccagtttgtatcggatgcagatgccgcaggcgtagcactcacaggcgacgccgatgctgaccgagacaacacgtcatctgcactaatgtgtcgacttagtcgacgctttttcacgcctgcagtccccgctccagcttcagcgtcgctacttgcgtctggtggccgtcgtgtccgtgggtctttcgggcgtatcctcttcttcaattcatcagctagcgacacaaactcctcctcggacgagaccgaagagctttggacgctggggggattactcgtcaccaccgaagtggacgtcgtgccattgctctcagccgcctctctcgctcttttcaacttttttctctgtctcttgtcctctttctccttctcttcccccaccttcttgtccatttctctcttcttttgccttctcaccacctcccgaggactactcgagttgctcctgcttctctcctcaatcggagcggcggcggcgtttaaattcagccttctccctgctccattctccgcctttttcctcctggggatggcgaaaggttcttcttctttcttcttctcctcgtcctctttcctcttcttcttctttttaagcaccattgccagcggccgcgtgtcctcctcgtcctcctccgcctgggcgttggccagacactgcagcttgagcgcccggtagcgctggcacatgggcttggtctcgcagaagcgcgcgtagcgattggtcaatatttgcttgcagaacgggttcccgcactggttattgagctctttctcctcctcttcgttctcttcttcttcttcttctccttcgtcttcgtagtcctctccctcctcgtcttgcttgcgctcggccgcctccgccgccacgcgccactgctcgaggcggcgcgcgttgatgccgccggccgagacgggcgccgacttgcgcgccgacatcgtcgcgaggccctgcggccggcgcgggaccctgtctaccatgccttttggccgccacattggatgcagtttcggtctgcggcgcaaaaatggcgggcgtcgacattttcgtacacaaatatgcatacaaaaaccaaatgaatctcagtgggaccaaaattgatcctttgtgcgatgaaaaagggaaatgttgatttttttgcaacataacgtagtaggtcagttttaggtcactgccgccatgcatctctctgcttgccgcgtccttggcctacaggtcggccatctcgtccgggcgctcgttcgggttcacaaggccgggcactgccagcttggcggccatgtcctgcttctcctgcagctgcgtccgcgccaggttctcctccaggaacagctcggcgttgtcctcgcccgcgaactccttgatgttgaccaggaagtcgcgcaggtgcttcttgaacgtcggcaggtccttcgacatgtcaaagcagcccaccacgaactccacgacctgtgcgcgcgacaggttcgggaacgacgagccgatcaggttggccacgtagtccttgaggaacgcctgataaataatgcaacacaaccgaggtcagataagggtaaacgcaaatcgagttcgacgatacaaattacgcaccgagttggtctggccgggcggtaccggacccgcgttgggcaccgactcccacagaggcacgaccacgtggttgttctccacgatcatgaacatgtgacgcaagatcgccgcgtgcagcttgaagccgaacttgtgcagacggtcggtcagcacggcgagaatgtcctgaagcaggagcaagtagaacgagcggtagaagccggcggcgatctgcgggttctcctggatgttcagcagcagcgcaaacagcgtggcgagaccctatcgtagcagtaaccagaatcgaaaatcccattagtacacatgtatcatattcgcaacaatcacagtggtaaagagcacgtaccgtgtcagcaacattgcgctccgtgtgcttgaaggcccaaataatcgagtccacaaccagcttctggtgctcctgggggatactgaacagcgcctcgaaacagaagtcgttcacagcctgcagcagcttgaagaagttcacacggtgctccgggaagtcctcgaagttcttggtaatcatctgaagggtgcactcaaacacagcctcgaggatcatcggcacagtgggcgcaatgatggtcttcagcttgttgatgctcgtagccagcaagctaagcacctcggactccttagcagtaggcgttgtgttctggtagtctgagaggatcgtctccaaaagcttgggtaggaagtgggtagccacgaattgccgggacgagtcatctccggcagtgtgctccacaaatgcatccatcagacgcaaactctccttcttagcactacgcagtgatcgcacctccgaagtcttcacagcaatctctccaccctgttcgaccatcacagcaatacgctgcgtgtacgccacgtacacgttcagcatgtcctggaaaatgtagcccatctgtgagttgaagccgttaggtccgatagccttgcacaccctcacgttcgtacggatgattttcacaatttccttgataccccggctgtcatacagaatgttcacgtcctgcgatgcttgggacataatggacttccaggcctcgttggggaggttcatcaagcgaccaaggagcacttcctttcggccagcatcgttttcggcagcaagcatcgacgccacagcctcgtagaacgtgtgcacctggtgcgtctccagatccgaaacgatacggggcagctcctccagcagctcctccacgaacggacggctctcaccgctctgaagaaccacgaatttgcgccggcacttctgcgagatcttaaggaaggtgtcacacgccatgtcctgcacaccggggtgaagctcgtgcatgaactcgaacagcttgtttacaacagtgcggaggaacttccagtgggcgcgcaggaaacgcgggtactgtccaacgacgtacataatgttagaagcgacaacagccttgttgtccttgccacgcttcatctcgcacagtccgagaaggtccttgatcaccgtaaccaagaaacgcttctcgttctcttcgctcatcgcacccgagatcgatccgatagcccagcaaagcgtgttcaggttgttccacgaccattccgtgccctcgacctgggccgtaagcttctccagcatgatcgtctcagtgtcatcgtagttcaagtgcgtgaggtacaccagcgtctcgtgcattgtcttatactgcgacagagcctccgtgtccttggtcgtctcacgcacaatttcgccattctcatcttcgacaatcagcacttctgacggcttaaccatcttcgagatcatcacgtgacgcacacggttcatcacgggtgacacaagctcgcggcggctgcgcgactggttctggaagcccgcaagcgggttcatctggttctggtccactgtgtacaggtcacgcgtgaagtagtgccagtagtccaagcagatcttgaaaatgctgtcgtcgtccacctcggcaatgcacacaaggtatgtgaaacccgcaagcagcgcctggtgggcctcgtcgccaggagcagtgataggtcgctcgatgacttggatgtggtaccggaagaaactcgtgaagaaaatactcagacgctgaacatacacctcgtcctgctcccagaacggcgtgaacgagttgccgggcggcaggatcttgcccacctcgttgaggacgcccatgtacagctgcacgtacacgttgttgtactgttcagggacgtcacgaagctgagcgatctcgctcaaacagctgatggtatcgttgcggaacacgcccgtcgccaggaattttgtgaccaggattttgattaggtccgtctcgaagatgaagccaagcggaatccagctcaggaaacgcagcagagtctgaagcgtaatctggagcagcgggacgtgcgtcgacttgttcagcacgaactcgcacagctgtaaaaagtacgttttactggttagcgtattggaaatatatcgcagcaaattcggtgtagccgaccagcataccgtacctggaaaatctgcgtgaactcgtggttgaggctttccttcagcgtcttggtcttctgctccgtgagctggtccttggagaagtcgaagacttcctcgctcagcagcttcaggatggtcatgttgttctcgcacaagatctccgacgtcttgctcgagttgacgatgtccgtgatgaacgacggccagttctgcggccactcgtgcttcagcacctgcacgagcaccaggtccatcttgttgacgaacatgcgctgactgtgcagcgtcgactcatccgacgacatctacacgcaatacacaccactatcaaaccccatacagacagactgaaaaacactccctacaccagtccacgcaccgacagcagcttgcccacgatgtagctcttgatgccctcgcgctggtccttgggcaggatcttccagcggtaccgaatggcatcttccaaaatctgatgacaccattgacgttagcataattcacataatgtgcacaacgcagtgcagttccgcacctgcaggccaaagaacttggtctggatactgctggactgctcgaggatgtcggaggcgcgcgtccacgagtcctggtgctcctgcagcgccaccatgatctggttggccacgcgctggtgcgggctcctggggtcgttcatgcacgccacgacctggtccagcgccgccacgtcgaagggctgcgagaagtccagcagcttctggccgactgcttccatcttcttctagcttttagcctgtcgtttactcctaattagcagtagcagcagacgaagtgactacaagtcagtgtgccatcatttctccatccccagaccgaaccagcggcgctacaaccaccgcaaccgcgcagtttccattgccagactcttgcgtttacaatggatgcgcagcggcgtggaagtagcggctggaacgctggttttagcgctgaaaaggcccatttccccttaaattcacacctttttgccgtcgatccgacgctaaatccgccgcgatgaagatccgctcgccgctgttgcacgcacacacgcagacactactcgccgaggggttagcacgcgctcgagagcgggcggggcccagggacacagcggggagccgccacacgcaccgaagcttcgccgcttgcgctttgttttgtgcctttgaactcttctgcgagccggaatcttagcgcatacgttgtgattggtggaaagtcggttcaagtcgcggcgtcattggatgatttttatgctcgcgaatgaatggcaacagcaggtggtgtgacgtcacaccaaatagtgtgcgccaccctaaacgcaatcttgaaaagggcgcgttcgtttccttcggcagtcgcgagtgcgcactcgccgccgtcccgctgcgctcccggaggctgctgcgccggccccagacctcgcacagatacaaccaccacacacccgtgtgcgcgcgacgctgctctatccgtccacgcaagactcaccaccaaagtctcagtattcgccgcgtaatccgcccaaactgcagaaaataattcaaaaatgcggtctccagcctccaccgcgcgcgttgacgcggctgtggcgtccaccaatcagcagcaagaggaggagcgagccgctcgtcggtctggagccacgcagttctcgctggataaggccgagagcgacgaggaagagcagggagagcaggtccagaggtcgccaatgcgcgtcgctgccagcccagcggtcgctgagcccaatcggccggccgcggagctcagagacaagagaatatggcgcgctgggagccgccagcagctgctggagcggacgagacgcaggatccgacgctccagtctgcagcagcagcagctagcggactgtaagtttatttattttatagttaaattattgtatttgtgcgttgtagttgagattttagttgatatttgctgctgtcgtggagctgacaattgatgttgtgcttgatttgttgctgtagctggggaaggagatggagcagtggagcacgctgcgttggcaaggcggagtagtagtgtggatgactttgcggtggagatcgagagtgaagctgcggagatcaggacgctgattgctcggacggcgcaactgtggtcggctgtagaccgcgcggaacgagctgaagatctgccgccagtatctcagccaacgcagctgcagtcttcgaggaggttgtcggcttctgctgttgagatgagaacgtcgtcgctgcctggacaatatgaatgtgctgaggatgatgatggtagcacgctgagcagtgatgctgaagaatatgaagacgaagatgaagaggaggaggacaccgagtctgatagtgtttccgatctggcactccagaacgctggaggataccccaccgacgaagcctttgtggaatcattgaggaatgatggcggcgttgccacaacttactctggtcgaatggatcaaccgcggagagtgcaggaaggagagagcgccttctttgacgaccacgacagtgagtgctcggaggaagaaatcgacgctatggatgaagtcgaggggctgcagtttgaacaaggcgagatcatggacgcttcaaaccgagccatcaatgcatcaaaagcgcgtgccattaagaatgcgatgctgggaaacttgctccgcttgggctttcgcgaagccattacgcttgcagcacttgaggccggggttctcgagatagaccactacgattccgactgcgagctggcgtatgtcgacatcttcatgtcgttaatcaaaatggtgtgtgatgcgcacgtcgacgttttgatcgagaacgacgacaacgaccaagattgggcatctcctgatagaacttctgaggttcacgacggcgctgctggcaccatggaagcgcacatgaaccacagccttgatcagcgctcttttcttcctttcaagtggccagtctttgatatggcgcagtttgagtttgggaatgcccgcgcagggacgtgcttcaacagtgtttgtgtgctgacaaacctgccaaaggtgtcgatggaccgcacggaggagttgatggaggtgctgtcatgcaatttgttttgtatgattggcgatccaattcaagtggtcattccatccgcgagttctacggggcgcaccaaaggtcatgcttttcttgagtttgatgatccagacatggccaaaaggtgtgcgtctgcagtggacggattgacgtggggcaggggcccatttggcagaatcaggggtaacttgttccgtcaataccaagtcaagacccccgctgaagagcagcggcgagctaatgctatgatgaacgatggggcatcattccctgattcgttttcaagtactgcgatacccggttcttatccagacgatgttgttgccccttcttatgagcgccgcgagagcagcattgcagtgcgatttcgacctggcgtggctcaacagcaaaatctttattgtgacagtgatgatgacagcagcgacgcgggtgaatgggttgtgagcagaccgcttgagtatggtcagttcaatccgtcaccattactggatctgtcatcgggaagcgtggacatcagagatcaatatgggtcgagtcaacaaggagatgccgcgatgcagctcggttgggacgacgcaggatatgccgtgcgattgccaagcgagggggatgacaacgatattggtgcaagttttgatagcaacagcgcactcgaactccagactcccgatgaagagaaaaccatggatcagtcacttttcgacgagctcgttcgagggtgccggtataacggctcagtttgctcgccagctcgcgtatcgttatcatcaggtgaagcccaggcagagtcatcgactgtaggatcaagtgtatcggcttacgcacacgatgtgctcgttgagtgcggtatggccgagcagtcatgggatgcctcccatgaaagcgaagatggtgctgagaagccttggcgacgatactgtgaagacttgatcgtacgcaatcgagaaatgcaggagcaggtcgcgtttgctcgtcgacgcattgtccagctgagccacaataaccagaagttgcacttgctcattgaccgcgtggagcgggatcgcgatggcttgctgtttgagaacgacctgctgcagacccaattgcatggcttcgaggatcacgaacaccatcacgattcacttatgaaggaagtggtaactttgcggaagcgactgaagcaaaaggagcactcgtatgacgtcaggggcatgaatccaaacccacaggtccaggcggcttatgtgagcactggctcgcagccatttcaaagtattcggtcggcgctttcccacatttctggagcatcactgacgagctgcaagatggatgaactgaaggactgggaacagctattagagagcacgttgagccgcgtgcgctccgtcaaggaggaaaaggcactggagatgcagaaaaagctggaccggcaagtcgaggaacagaacgaactcaagctttgcgtgatctgcctggccaacgagaagaccattctgtgtctaccgtgtcgccacctgtgtctatgtaagacttgctcccgccgtgaagaagtgaccaagtgcccaatctgccgtctagagatcgaggaaatgttagctgtgtactcataagctcaaatcacctggatttgtaaactatccgtagtcactttgcgtcgttgaccgcctaaaaggccgaaggtgacccggccatcatgcagtcaagagatgtggacgaagctcttgtaaatgcagcggcacttttagatgcagccgaagctgagaacgacgatgaagaggcggaggaagtgtttctgcaaggtggcgaactaacgaatagatgcagaaacccgttctgctctaaagttctggcaaaccgctacgcacattactgcgagaatcgatgggtgtgccagcagtatcgagcgctcaagctgcaatgcttagcgaacgcagagagagcagcggtccaagatgttgaagcgctcggacggacagattcgtttatgagtgttcaagcacgagagcaaccaagatcgatgactcggactgctacggagaatggagttgcggacgagccgtatgtgatcccgcgtcgaaaacgtcctggtaccattcggactggagcagccgaagttctcagcacgagtcgatcgagtgagccgtaccggccttggagagcgacaactcggaggtgtgaccgtactgatggcgagccgaggaagcggaaaaggttgcgcctcggtcgtggcatgcgattcactgaagtcctggcacatttcgatccgcgaacctcaaattcagcaaccatcgccccatcctgtcaagctcgggacctcgggatacaagaaacagcgcaaaattccccggtgccccatgcgagtccacgtgcagcacctcctgctgttgttcgacaaggggaacagaatcttgctgagggcgggcgatatttacaatccaggaatgtcctttcacaccactctacgcggaacttccctcgaattcctcacccggcttacaaccccaatcagcgcgatgcggaatcggcagttccccagactggcaacaatcgccatgcagatgcagtacctgtggcagcgctcgtcctgcctgctcggaggatgatggaacagctaccgatacgaaatgcggagatctactgaaaaagtgatattggattcgttctacgataatgagtggaacagcatgccaccacgtaattggcgattttccagtctgtatcgaccacagttcgaccaagaggaccaccaggatgaatataggtccaactccgccccacatccacactcctacctgccaccagcccatcgaaccaatgctgaccaagcagcgggtaggatcggccgaagagaagattacagtactgttgaggagccttgccatgcttacctaccgcagtacgatggtgtatgcaatcgagtggtctgtgaagagaatacaacagcgacctggatgcccaacgtgctgcacaacgagaagaagcatggcggtcggacacacgctcacttctcttccgtaacgattctgatgcgagaagttccagatgcgctaatgaacctaacggaagtgctgatcgaccacgaaatgtggagccgttcttgagtgagcaacgtccaaatgaatctgcgaatcgtgtatttacttcggaggcggtgaggttgtcgcccccttatgcagtgcagataggagtcgacacggatgacgagtatgaggcaactttctcgtttcacgacccattcattgttctgtcacaattcatccgacatttaccgactctgttggaacccgtgatgaacgtgacgaagaagccgcgcaaaatgcaatggtacattgactacatgaagaaaatagagcgcacttgcagccctctgcgtgtacaattgaaggacaagcgagttctggtgacgattcacaaccgtgtctggatcgacttgaagggttcatctacaatcgtggtgctacaagaaactatccaacgactgagagcggaggccatttcctggaacaatctcaagtgagatttataaaagccggcaaggtgatactgtggacctaagcaacgtgttcactcggacgtggaacaatctcaagtctcgcgcaggtgatgtatggcagaccaactacttccgtggagctcgcctccaccactggaaatttgtcgtcgggaaggttgagatcggcagcgggagtcacgaggaaaagcgtgaagcatttcgcttggctggaatcagtgctgcagagtttttacttcggctcgacgatgggcaaaacgatcgcaggtggcgtccaagctgcgacgaatccgactcatgtgaagacgttgagttcatgtttgtgcgaggtgctggaattgggcctatcgctgctgatgctttaataacgataagtgacagctcaagctcaacgtcggaagatgtcattcagactggtcctccttcgccagcaacagccacacctcaaattgaagaggaagccaatggtaagtgtttttttttttgcttcgcatagtgtaggattcgaatctgtccactaacgacgtttgattcgttactatgtaggcgttgaggttgttgagatggctagccgggatcactcgttgactgcggccctcctttccgagccggacacgaataccgaagcgttttccggtgtggagcatacacgaacggtgtggagttccaactatgggcctgccggtgttgtcgaaggattgccacccgtgacggcagacatggcagtgacagcaatacggccatgcaggttgtgtgagattgtccgcatgcgaaaacctgatcgtgctggctgccgacaatgtcaaatgaccaacttaagccggaacgtcaatacgcatgaactgtaagatctgtgcagccgaaaaactgggggcatcacgaaaaataccatttgggggcggctaaaaatggccaaaagtgaatttttttaagcctgtcaccgcagttctcttctaaatctaccaaaattaccccaaaagagggcatgctcccatgttttgacgaaattttccccatgccccctgtacactacgtgttctctgaaatttatttcagagttaatggacgattggagtcactagtctgattaatggcttagtgcattcctgatcgatccatcaactttcatcgatagacgaggggtttcatacaaatagcaagacaaactgcagtacagtggagtaaaagaatacacataccgcgtaaggtgatattttaggtgaatgttacctgtggcggcaggttgtgtagagcaccccaaatagctacattcgagcgacctaagtcgaaaatttgcgtttaccgatcagaatttaacgatagaaaaaaagattaccggggtggctccatgatcttagctctaaacatcaatcgtgtagagtcatttgatagacagtgtatgacttcagctataaacgcactcattgttctctcagttctcattttgcattgaccactaaaccaaacaacaggccttcccactcaccaagccccagtccaatctacctgcaacatggagatgacgctacacgcgattaataccagtgcgtacaattgcagcaggcccctaccgtactaactaactagttataccactcgatccggtaagtcaaacactgcgtactaatcggttggctatcagatacgacactgaacgggccgtagctaccggtgcggctgatcagcggtggtgttggtcaggagcagcacgtgatctcacgcattgaaatacacgtcaatggtgcggacaagcgcaagtataaatgtagtagctacgagaataaaagtgtgaccgccagtgacactgtgcaagttaccgcagttttttaccctctgtcttgccgcagtggttgacggggaggcagactgtccagcgtaggggtgccgtacggcgagtccatttcggattcgactcaaaaccagcacttctcagactggaaacacgcccgattacacaatgcaacatgcagacagttaacctgctcctggcggcgcttgttgtcgctaagaaataagctacacaagcaaccacagtgttaacgaagatagagagctaccaactaacgagacgagaaggaggagaacattttcgtaccctcagttgtcgcaaattgcgactcgcaatcttcaggggtctcctcgggaaaatcactggtatcgtcatcaagggcttcagccgtgtccacgtgtagcagatccaaggatgctcaagcagcacagagctttggcggtcgcccggttgcagggtcggactcgcctcttgcttacggccgtcggagaagctctcgtcggagaagcgaatgcgcaacttgccgtttgcgcatcgaccaacaagcactggccaccgaggtagagcaggttttatcttaaggaaggaatctcacttttgctttcgctccctagcacggaattgactatgcgccagcgctgtgcggacagcggcgagacgcttgcgaaagcgctcgccacggtgaaggattcatttgagccgaagctgctggaggtagtgagcctctacgaactgcagacgacggtggaggaggtgacggaagagcagctggtcaagctaatctacgatcgcaccaacaacgtgatgaactttcgtcccagacctggacgggttctttcgcaagaacctcaagatagacttgatggaggccgacttcgacgctcgggtcctgaagtactaccgcgacttctctgatctaattgagcagcacggcgttggtcggctgctcgctgttgagctaccgggcgacagcatgtctgaggaccgcatgaagttgcggtgcaagatcctgctggataacctagagccgcaggtcctgcgtgatgatgtgcagcggtatgtcaagtacgagtcgccgctccgctaagaagaacgactatgagttgtttcgaatcatcaaggagcgcacacgggcgcagcacaagtaccacgtgctgaacctcgagtacaagcagaaggtggagaagagcagtgacagaaagccttcggtcaaggacgtcaagccccgcaaggattgcgagcagcgtggcggcggcgacctcgagaaaccgaaggcgagccccagcatgccaactgcgcgaggcaagggtgccagtccgccgtcggaaggctgccttcactgtgggggtacccacggattatgtgaatgcccttcagcatccgaagaggatcggcgccgggctttggagaagctccgttctcagcgcggcagaggcaggctgcgatccaaggcagtgcggaacgacaagcgacagggcccgaagaccggcgaggtgctcgtcaacgggatggcgaccgctccgcactgcgccgactcagggtctgaccgcagcatcatcccccagtatctggtcgatgagttggtggagttgggcagtgacgtccagctcactctcctatccgacccgattgtggcaactgtagccggtggtggccaggtggagtgcacgcacgaggtggtggttgatttgcagttgcagactgccgcaggtatggtgcgtgtcgcaagtgtcgcatgccttgttatgggtggcggtgagacggggttcttactcgttgacgaaatgctcaagtcgctagggatcgatgtgcaccgacagctcgagcagctcgctggtggggacgcagtgctcgacgatgacctgttcgagcccgaagcgcccccggcggacaccgatgtggtggtgcgtctggatgacatgctggttgctgtgctacgtgaaggcttcgacccgagcctgtacgaggagctgcgacaactgatgtttgagtatcaagacattttcgccatcgacgttggtgaggacccgcccgctagtgtggagcccctgatggtgacgctgaagccagacgccgttccgttccgtgtgaagccgcgcaagtatgcgcctgcacagcgtgagttcctccgcaaagagctacggcgactggaggacatcggatacatccgcaagaacaaccacagccgctgggcacgcgcagtggttccagtggccaagcctgaccgcaagatggagtttcgcatgactattgattatcgaccggtgaacaagcaacccgtgccgattgcgggcgccgcgcccaacatggacaccatcacgcatgctgtcgcaggagcctatggtttctcgatcttcgatttgccaaaagttttttttttcagttcccgctggccgagaccagccaggagctgatgagcttcatctcggaggacacggtgtactcacccacgagggtgccacagggggcatggactcgtcggttcatttccagaaccagatgcagaagatcttcgctgacatgctatacactagtcttctgctgtggatcgatgacatccttgtacatgccacgtctgtacgtgctctgctcgatgtgctgcagagttgcttcgagcgcgttcgctcgtacggcctgcggctgagcgctatcaggagctgcctgttcaagaaggaagctatgtggtgtggtcgtatgattagcggtgacggtatctcgcatgatccggcacgggtgcgcgcactcgcgacgctgccacttcccgtgactggcgcggacctacagcagtttctgtgcggtgcgggatggctgcgcgacacgctcattgactatgcccgtgtggcccaaccgctgcatgagaagctggagtcggtgctgtccacggtgggtcgcacccgtcgactctgttaagcttcctctgacgcaaagctacggcagtgaaattcacctgacgttggatcgatgcgagcaagaagtgaagcgcgcgttccagctgatccgcacgtccaacctgcagctatactcgtagcgctacactaattttgtccctcatacatgtggaatgtcggcgaatgcatcggagggtcatactgtgacgggaactagagatgtttcagcagaaatgaagagggaggttgacaccatggcgtcaacctggagtggaccgaggaggagatcgcggcgtttgaggcgatcaagtcgctcatctcatcttcgcatcctctcgcgttccccagtgatgacagtgaagtctgtgttttcccggattcttccgagactggatggggtctgatcgtcacacaggtccttcattgggacgatggcctggcgccgtgggagtaagcccaccaactgttggtgtgcaagagcggcatcttctcgggtgcctccaagaactgggccatcatcgacatggaggcgttcccgatcatatgggcctgcgtgcacctggagtatctgctgctttgcggccgtggattccgtctctattgcgaccacaagaacctcatttacatctttgacccgtcggtggagctgaagcgccatattcgggggcgactgcagcgctggcccctcgcgcttgctgggctaccgtatgtgatcgagcacctcgacggcgaccggaacgactggctggatctactctcacgatggggggtgttcttcttatggagagggtggggcaatcacgcgctgcaaggccatcactcgcagcagcattcgggctggaacggcagcctcgcacgacgagagccaccacctgcggcctcggtttggtggattcgtcttcccaacgcttgacgagatcaagcatgcgcaggcggaccaccagcgtgtcaagccaagctcaacgatgagcacgttatggtagtggacgaaaagctgtggcttccagagcgagcgaaggacctagtgcgccgagtaatggttgtggcccattgcggcacccaaggccatcgcggcctggagccgatgatgtacacgattcagcaagtcttcttcgttcgcgagctgtcgaagctgtgtcgccaatttctgagtcggtgcctgctctgcaagcacacgaagggcggcaacatcgtcccgcgcgcatggagtccgacgtgccaagcgacaaggcgcaacgagattctgcactacgacttcctgtacatgggggccagcatgggcaccacgctgtatgtgctcgtgctcaaggatgggctcacacactactgcgagctgattgcgtgcgactcccccaccagcgatgttgccgtgcaagcgctgctagactggagcaaacggttcggcacgccggagatgctggtgtctgacacgggttcgcacttcaagaatctcctcgtcaacgagctctgccaacggctgtccattgagcagcattttgtcgttgcctactcgccctggatcaatggctcggtggaacggatcaaccgagacattctccaagtgatgtgcgtgatgctgatggaattccagctggacacacgcgagtgggtgtacctgctgcctttggtacaatccaacttgaaccacactgcctgaacaaccacacgccgagcgagctgttcacgctgctacctgccccgagtccactcgcatctatcgtggtaagaagaacctgatcctggatgcggtgacccagcgtgacaacgtcgaggagctacaggaggcgctgcacgccatgcatcgcgaggttgttgagaccaaggacgcacgcagacgccggagcaaggacaagtcgactagcactcagtgcaacttcactgagggtggcttcgtgctctggtcgcgaattgacagccgtctgtcgaacaacaagctgctggttcgctgggttaagtgactgaggcgctgccgcattcgttcatggtgcgccacctcatcactaacaagatctacaacgtccacgactcccgtctcaagttctttgctgaatcaagtctgtgacacgatgaaattggagattttcgaggattccccgagccgcgcctgtgattggttggctcagaggcttactatgggagagggaagcagcgacacgtggcgtatgggaagagcggatcccggccggactcgcgttggcagtgtacaaggtttggtgaccccggatggagatgtccccaggagcggaccccggctggaaccaagtaccgaacgagaggcaacgcccaagggagcgtaaaagtgcctccgactggaggccgcctgctcttggtgcactgtacaacgcaagaggagcccgaccggattgagtgaagacccagaaaccgtgaagctgtccaagataccccggatgtgaagcccaagtggagtgtgatcccgtttggagataatcatgaatcccgaatggagataccaagataccaagataccatcccagatgtgaagatccagtatacaaagtccaagatgtttccgaccgaccaagccgaccagccaagatctgttcggattccgtggaacattgaacttcgcttgcgtacccagtgatgattatacttgctggaagtatgttacgagggaccgcggacgattacgacgacaagaccatagtgaagacaagtcaagatggagtgcaggtaaagatcgacagaagatagccagacagacagacagccagacagacagccagccagccagccagacagacagacagacagacagacagacagacagacagacagacagacagagagaccacagataacagataaacagagttcgttttgccaaggatcgcacaagtgagttggagcagcctaccggacgtgcattcccggaggaccgactaagtctacgtgtgagggcccagcaactgtgacatctgggtcgagctcccgcaaccaagtccagtccaagttggggtgagtaccgggcgacaacccgaggttgatccaccccatttcatttcctagttgcggttgagctcgtccagaccaggaaggccccgcatttcatattaccgattacctttccaccccggttggagtagccccggatgggaagtattgatttaagatctcttgtgtgataggaggtagttgattgtgttagttgccctcagtacttgagggtggtgcgcgtgagccaaagccgaccgggattgaccagtatcccggagtccggctggagttgactggagtagtgaccgaccctttcacggtccaaaagaataaggaagggctacgtgtttgtatataactctgtatctgtttgtattgtttggttatctgagggctgtcagaggcgacgtccaggaaggttacgttctgccctgctacctagcgacctacaagtatcaagacaactcatccacggttgaagacccctggttacgaagacaaacgaacccacaaagattgttcacaaggacacacgccaccccggttggagtgtacatctaggtgtactatctccggctagggtttgttctgggtgcaccccattcgggagtctacacccggcacgcgtcaagctatacacctgggcggtcaggcgttcacccgcctcgcctcatctggtgcgcgtacccggattcgaaccagggatttcaccggagttgtttatattttgtaagtttataggtgtgaggtgtgctaactttcctaactagcatctatgacagctaagcgaggagacatgcgcgaaggagggcgcggaggacgaggacgcggagaggcgtcgcgtcaatcgcgtcgtgcggcggggctgctgcccgaggagcaaccgagcctggaagaggttcaacgcaatgctcggagggttaacgctgaaaagcggaaggcggccctggccggagatgggtcttcgaaccaagtccagccggcacctgagccagccgtctcagatgacgcgcaccaagtgtcgaaggacagcgagcccgaacgtgctgacgcgggcgaggagtcgaagaccgctgagggggatcctggacagggtgaacccaaccaggcgtctgagggaggcgccgacgtggatgagccccaggcggagggtcgagtttcggactcctctctgtccggccaagatgtgcagccggacgcacaagtgtccgccggacccaagccgacgccgtctgccgaggaggagaagccggccgcagttcctgcgaaggcggtgaccccggccgctgatgcccaaccggagacccaactctcggtgaaggtcagcgggggtaacccccgacggagttgccggccgagcatccaggtgtccaagcggcgaagacgtacgcggcgttgcaggcgtcccggtgggagagagcccggtctgggctcacgcttccgccgaacgtggagtatgcctggccgaagtcccgtccggactccgtgctgtggctgaccgcgacgcttgcgacgtccaagtacctggcgtccaaggtggcttcgcaggacctggccgaagtttggttggccgacctggcacccagccgccgagagttgtcgactgcccaggacctggccggagtccagatcccagccgggttgctggactcacgggagtgagttgcggttctgcagacgctcctgttcgaggccggtttccagttcgtcaacgtggtgccggcctgggtggagatgcgagtgtccaaggtagagccgatgtccatccggaccctggtcggagacgtccagcgactgctgacggtcgagctcatcgagtggcgcgagctggtcgtcggagcgacgttcgacatcctgccagcgttggaggcccaagtgaagacagagaagccgccgatcatggattaccacgcggaagacacggatgtagatctattgatgaacgactacgaactcttgctgggtcggacctatgtcctacgcctacgcttgactggtcgtcgtcccatccggagtccgagcgggtcgtccactggtgagcctgcgcccaagcgtccgcagcatgcgccgccgagggccgagagctcgcttgcgtccccgccgtcccagttcgagtcgctgccgtccgagtttccgtcagctgaggagtccgcccgggatgccctggccagaggtgcaacttcggaccgtgtcccgagcatagttggcacctcggaccgggtttcctacggcgcgacgtccgagtcgtacgtgtccaggaacaccacctcggactcatcgacctcgacgctcgggtacagcgctgcgtcgcacatgccgatgccccagttgagatccttggcgatgtccgcccggggtccagttggcgtgtcggtcggcgctggagacttgggtttctacgtgacgcgcgaggtggtccccaagcgagagccgaccccgaccaggctgatgccagcatggcacgcttggacgaggtggccagccgggcgacatccaggacgcggacgtcgacgaggtcccggacgcaccgacgctcaaggcgtgactcgctgtcgagtggctcggactcggatgaagatgctcggcgtcgccgccgacgctccaaccggaggtcatcacgagaccgatccccatccaggcgctcgagtcgatccaggcgctcgtaccggtccactcggtccggacgggcaagcctgtcggcccagtcggggatggcggagatggcggtgtcgaccttccactaggtccagcagcttggtgccgagctgtcgaagctgcgcgaagctgtgtcgaccgggaaggatcccagccgggatgccgaagccgagcttgctctggccgaagcccaacgggaggcgcgcgaagccgagcgccgggcccaggagcttgagcgacacctgcatgaggcctacgcccaggcgtcccaggccgcctcgcagtccctgacggccgaggccaacgtcgaagctgctcgtcttgaggccgcgcgggccgagcgtgaacgtgtggaggcagccgccgcggagtacatccgccggcagctagctgaagccgacgcgaggcacgccgctgagatggccgcccgagccgggcaggcccagcaggacctggccgcgttggcagccaggctgcaggcgtcggaagtcgcgcgtgcacaggaacgtgagtctgctcagaatatccagcgtttccatgtgggacatatacgcgaccttcaagcaacatctgcccaagctcaacctgaacggggaacatccgaccctaatctggcaactcccatcaaacgggaagtgaaaaccctgaacgggcaacgggcgtaatcacgggaaacgtaacggtcgcaggtgcacagccgggacagaagaacacgaccgaagccggctgggagcagcttctggcgacactgccggaagtcgacgtcgcgcgtctaacaaggactctgaggccgaccgtggtgaagaatgagccggctgcagttaatgcggcgcaccgatctactacggcgacgcaagttgccccgacggggacctccggtccggggaccaagacgacggtgaagaaggagccaacggagccatagaaggacccgcccaggaaggacgaacgcaggaaggacgagcgcaagaaggcgccgcgcaaggaacgccgccgggatcgcgactcgttcccggattcaagctccagttcctcgagctcggatgatgatagctccagctcgggcgacagcctggacgacgaggacgctacacagaccgtggagtcaactacggttggggatggcaagacctcctggacgttccgctcgtacgtcaactccagctcgttgggccagttcaatgagaaggccccgcttggagaccgacgtacctggtgggagaagttcaccaacatctccgtccagggtggttggtccgaccagaccaaggttcgcgagctcaagatgaagttgtcgcctgccgtccggaattggcgcgaacagctgaagaagcacgtccagagcaattggaagcgcttcgtccaggagttccgtcgcaagtacttgaagctccggacgtcagagtctgaaaggtattataccatgcggcagaagacatctgagaccccgatggagttcttctacaggctgaacgaggctgcggtcaaggcggggatcaagtaccggaagtccaagaaggaacgcaagcaacacgtcaagcgtttcctgaagaacctcagggactcccagctgaaggccatcctggctaaccagaagatccacagcctggacgacatcgaagacatcctggagcaacaggaggacctgaacctggacgggggctatgatacgccaccgcccaggcgggacttccgagcgggcaacatccaggattcccgtttcaagccgaggcgccgcgcgtttgtggcaacttcggacggggagtccggctacgagtctgaaggtcgtgttcgtttcgaggatgaggtcgaggaagccaagctgtcccaagcggagtcgaaggagcccagccggagtgccccggctgaggagacgccgagtaccccagccgttgctcagatcccggagcctgagctccgccaaactatcttcaaggcgatcgagcagactgggtggcgcccgcctacgcagagtgattcccatccagggtggcagacgccccggccgggatgccagtcaccccgacgggagaaccccgaccggaatgcgttttgcgaaaagtgtctgaagcttgggcacctcgcaattgcctgcacatttcagtcatgctcgtaggccactgtggagaccgcgccatcatgggagccctcaagtcgctagtccggaagggtatgctacgtgatctacctctgccacttcgtaaacgattgctggacggagatgcccaaccgggaatgcggttaaactactaagcccactggatggggatccagaacgcgccgtgcaaccgcagccccgattgtgtgcacttgcgtatgttgggccagagctgagaagacgacacggcctgacggctattgacgtgcgtgctaaccccggccggggagaccccggacgggaccaaccaaacgttgatagcccggtcgagttcacgttacagcccggacggagatacggatggtgggagaatcacgtgcccgatgaaagtcatgaagtggcgacagtgcatggggcggtgaacgatctccggacaaggatactgcttgataccggtgcatctggaagcatgattcgcttggaccttgcgcttaggcttaagctgaaattccggatgctgccgcagccgatcaaggtgtcgggattaggaggcgttcccacgagcatcacgtcttacgcccgggtgaagatcactctgggctcccgtgtggcatatgtgacgagtgtatgactggcgaacattggcgaaggattggaagtacttctggggatgaaattcatgtatgcggctggggtacgactgagcgtgcgagaaagactggtgaagctccccgacgaggaagccgttgtgatgtgtgatgaccggcgtcatcaacgagtggtcttggaccttccaataaccccagaagagggattatatctccgtccgggggaacatgtaatcgtgaagatccggtatggcaggagcaacccccaacgagaagttgtttgggccggtcggggtgatcgctgggttacccagaacctgtacgcaaccaagtcgtgggcgtccgcaatgaaggtggtgaatatctccaaccagagactgtggatcgacaaccggactcctgtggcccgaaatgtcgagttcggaagttttccccggatcgggaggtttgtccgcccgggaagcaaaaggtatcaggagtggcagcatcttatccacgagaccacagtggccagtgacacaggcgagggcgaacgcagactggagaaacttcgacggagtaaggaactacctgatatccagatcccgggatacgactggtcgtccaagttgttgctacgaccccatccggagactgcacagactcggatcgtcatgttacagaaggctgcccacttacagctgccaatgcgcgctgaggcccagaagacgaagaacgcaggaacccagacggataccgatacagacacaggcgatgacagtgacccgaacgttaatgattgtaccataagctgtgaagttcggagatctccaacaccacgttcaggaacaacatcccagatggggattcccgaagttggcgacgcagcttgcgtccgacagaccagtcaggaattggattgccagctcgatgaccgacacgtggagaagatcctagatgtcagatggaccaaatcccctggggcgtccaatcgggcacgagagtatctcatcaaatggaaggggtacgacgcgcatgaatggataccgatggcacagctgaattgtggggcgctcttgtatgagttcaatcaaggggcgaaagcccgagcgcgtttccaagccatgcaggctggggacgaccaacctaacatacaatagttggggttggtcaagtccgaatggggcaatcccaattgggagtgttgatcccagttggagattccccggcggagacccgaaatggctggatgcgaatgtgtgaattacggaaaattgattttgaatttgtatggagcgctctacgacggaattgcgactacggagagtaacctgagcgagattggggttttcaatgacgagtgtatgaggttgactatgctgccctgaaggaggtggcaaagcggcaggagaggaacaagactgcgcccaaggttgaaccgacctggacaacctgaccgaagaaggaaaatgatgaaggcagcgaagacattaacggtgattgtggaattggagtgctacgctacggatatgcaactacatccaggactgatgtggatgctggacgggatgacctctctggaatttagccgagacccagttgccaacgcgctcgtgctctgggagcagcatcttgtcgacgatcttggctgggacgtgcgccagacgctcgtcatccgtacaggtagtccactgagtccggccggggtcttcgagttcggccatcgtgatctggtcagccagggtgtaacgcgtgccatcgtccttcttggttgattcgtcgaccaagtacaggtagcagatcttgcacgggtacaaccagaatccaggctcccagaccatcgttttcggcatgccggccttgatcagacgcttgatgcgggcctcgaaggtgcgcgcaaccccgtcgtggaacgcctggcgcttacggtggagatcttgagcccgttcgtagatcgtgaggtcgtcgcacttctcgtcgtcttcaggcttggtcttcatcatgaaccagtgcaggatgtgccagaaggctggaaggtgatccttcttgtactccacatgttggtccaggatgctgatcacggttggagatagctggtcccggcggtggaagtacaggaccttgacccggttgttaaacatcgccagccagggtgctttctcgaccagcgccgcgtactcgtcttcgactgcgggccagcgcctagccaggaacttggtctcgggctgatggggctcgtagttcgggaagcccggagtctgaccttcgataccacccttcttgggagcaaaccgagagccaatgccgcgacgacgccacgagacgatatctccagacgggacctcgatgatcgccaactcttcggcagtcaggtcctcataggacttcagcgccagaggcgacttgccgccctcccgtttgggtttcgacgtccggctgcgttttttggggttcttcttggacgaaggtcgatcaggtttatcctgcagcgcgaacttcgaccggggagaccggggttccttccgggacgacaaccggggagaccgacgctgggatgaggaagacgactggagctcgtcctccgaggagctgtccgaagatgactgaacacggttccgcttggggttgcgcttgggcttggacggctgctcctcatcggtgtcgctatccgacgagctgctctcgtcaatggactccgccttggatggcccatccgcactcttcccagatggagacgtcttggccttgtcctcgtagtcggagtcacgagagtcgtcactttcactggagccgtcaacttcggcgatctccatctcggcagcagcctcctcggccaagttgcgcagtggcggaaactcctccggatacatacccgaccggagacgaccctggagcacgacctcagccatcttgtagaaggtctcggggacatgacacgtccagagggtgtcgtccagggtgccatggtacatcatcttgaccagcatctccagcagccaaggctttgggaaatactggtgggccggacaatcctgacggaggatgtcaaaggcctcttcgtacccatggtccatccgcatgacgaactggacatccagccggacatccgaccaagggacaaactctggcagggttgcagcacagtcggaaatcaggcgcttgaagtccgtctggggcgacagagggagcacatcagatcccgggtggaccgtgggtcgcatgtggacgtacaccgacccacccttgctggaaagctcggccataccacgtggacatgaccccgaacgggaccccctggatgtacgccgcttgggtttggacggagacgcatccgcaggcgggaagtccgaacggataggagtgggcgggttgttctccgacttctcttcacggtcaccatcctgaccgccgtggccatcgcctgcctggtagttgtcatcatcgtcctccatgtccgggtcgaccgggcccggatagggcgggatcatcttgaacggacggtcggcaacctcgacggtgatgttggtgacccagtgtgcaggaggtgtggacccccgttggaagtgccgcagcagacgcaccagcctggtccatcgaccgcaagtggcagccccaccttggttgaggaaccgcatcagccggtcggtgtcaaacgcatcctcctggctggtgacccgcagacgctggacgaccaagattgcccgctcgagtttggcctcggcctcggtgaccttgttgcgcagcgagttttcctcatccagatggctttgcgccgccaaggcgaagtcattctccagctgggcttggagttccaccttctccgcccggagtgcagccacctcccgctggtgatacatctgcaggaaccggtgctcgtcgacaagcctgtcgtaacgctgttgcaggggcggccccgccgggagatacctcaaccggcccttgaatggggatgtcgccacgccgtgcccggtcgaggatacggtggagcagggacgtcgtgaagaagagcctctccgcgaagcgcctggctgggaacggggccagcacagtggcggactcccggcgccacagcaatgagttcaaggtggcctcgagctgcggcagcctgggagattcccggttggcatgcgggcgcagcaaattattgcgcagctccgtctgactgccaaccaggttgcccaagtcgtggagatcctgagcggagaagccgtcgaagattgctagcgcctccgtaccgccttacccctcctggatgtagcgctcagactgatacgccagcgggtgtgcaggaacgccgaccaggtaggagttgccgtcaccaggacgttggggaggaggatgtgacgcgcaggcaagatgttctcaatgccacgaggtcccggatgggacgacggcagagtgccagaccgcgtgtgctcgaccgcctcatccagagagagcagaccggagatagccgcagtgacagtcggagtgtgcccggccggaggatcccggatggggacttcctccatggcctcatcctcccggacgggctggccactggcgcgcaggggcgagttcctcgcagaagacgctgcgctctcctcctcctcctcttcctcctcgccgacgtcgtcgtcctcgccggtgcccgcctgctcgtcgacttccatggtcgccgaccgtgcgcgcagggctgccggtcctagccgacacatgggcctcaccggtaacagccagactgccgccgccgttgaccgcgcccgcctccgcaccccccactggaggcgcagagggcaggagttacgctgggataagcgccgcgtcggcgctcgatgcgggggtgtccatggtgtgagtagtggcgcgcagatttcgttgtgagtggagatttggttcccgcagactggaaagagaaattgatgaaaagcgacccggtagggacagggcgcaaagatgagacgccacagttgggagttgactgaagacatccccgtctggggcgcccacccatctgggcttgctcggatcgtgagatcttgtcattatcgatcgtttcgccgaatggactctacaatggatcgtaacaagaggggcggttgacacgatgaaattggagattttcgaggattccccgagccgcgcctgtgattggttggctcagaggcccactatgggagagggaagcagcgaaacgtggcgtatgggaagagcggatcccggccggactcgcgttggcagtgtacaaggtttggtgaccccggatggagatgtccccaggagcggaccccggctggaaccaagtaccgaacgagaggcaacgcccaagggagcgtaaaagtgcctccgactggaggccgcctgctcttggtgcactgtacaacgcaagaggagcccgaccggattgagtgaagacccagaaaccgtgaagctgtccaagataccccggatgtgaagcccaagtggagtgtgatcccgtttggagataatcatgaatcccgaatggagataccaagataccaagataccatcccagatgtgaagatccagtatacaaagtccaagatgtttccgaccgaccaagccgaccagccaagatctgttcggattccgtggaacattgaacttcgcttgcgtacccagtgatgattatacttgctggaagtatgttacgagggaccgcggacgattacgacgacaagaccatagtgaagacaagtcaagatggagtgcaggtaaagatcgacagaagatagccagacagacagacagccagacagacagccagacagacagccagacagatagccagacagacagacagacagacagacagagagaccacagataacagataaacagagttcgttttgccaaggatcgcacaagtgagttggagcagcctaccggacgtgcattcccggaggaccgactaagtctacgtgtgagggcccagcaactgtgacatctgggtcgagctcccgcaaccaagtccagtccaagttggggtgagtaccgggcgacaacccgaggttgatccaccccatttcatttcctagttgcggttgagctcgtccagaccaggaaggccccgcatttcatattaccgattacctttccaccccggttggagtagccccggatgggaagtattgatttaagatctcttgtgtgataggaggtagttgattgtgttagttgccctcagtacttgagggtggtgcgcgtgagccaaagccgaccgggattgaccagtatcccggagtccggctggagttgactggagtagtgaccgaccctttcacggtccaaaagaataaggaagggctacgtgtttgtatataactctgtatctgtttgtattgtttggttatctgagggctgtcagaggcgacgtccaggaaggttacgttctgccctgctacctagcgacctacaagtatcaagacaactcatccacggttgaagacccctggttacgaagacaaacgaacccacaaagattgttcacaaggacacacgccaccccggttggagtgtacatctaggtgtactatctccggctagggtttgttctgggtgcaccccattcgggagtctacacccggcacgcgtcaagctatacacctgggcggtcaggcgttcacccgcctcgcctcatatggatgtcaccgaggagctcatcgcgtatgtcggcaatcaaggcatgatgttagagatcgagcagttcaaggattaccgtttcgccaagtcgagcaacgagtggcctccaagatgaagagaacccgtgggaattgctgagtgcaatggccgctgaggtacccgtcaaggtcaacgagtatgtcgggatcagcggcagcgcggcgctgaagacagcgctagcgaccaccgtcgaacggccggtcaagcctaacaagacatggcgttacgtgtggcaagccggccaaccgggcgacgcgctgcagctcttggagggcggtgtagcagatgcaaggatgctcaagcagcgcgagctttggcggtcgcccagttgcagggtcggactcgcctcttgcttacggccgtcggagaagctctcgtcggagaagcgaatgcgcaacttgccgtttgcgcatcgaccaactagcactggccaccgcggtagagcagttttgttttaaggaaggaatctcacttttgctttcgctctctagtgcggaattgactacaccacgtctggaacccaaatttcgtggagaagctgagcgtggatcttgcagcgattgaaaaatcggagaagaaccctgaatttgcttaagtgtagaggaaaagaacatttcaacctaacgtgcatccctttcctcttttgcttcgccaatcatattggtttttgaaaacctgaaattcgagagcttcttcgggccggaggcacgactttgtagctaataagcgaggaattactctacatacgtaggcaagtctcattcgtggaaacgttagtagattgatgacgtacttataagtaggtcaggccatagcacgaagcgagccccccgcctgcgtattgtcagcccgtctgagaagcacgcggatacaaacccagggcccagcattgccttctagcaagcgcggtgtgcgagctgaagtgggcttactagggcgagcgcagcgatccttcagggtcggatgaccgctcgaagcgcgtaataaggtgatagtttaaatcagtacaattcatagttaccggcatagccaccgggacctactttttacaaaatcagttgtacctaggttgatgaattatacgcccaagagtacatgtaacgtaaaatccagagctgttccgggcagagcacggccttgtcgaaatatcatgttatccaaccaatcacagagcgtgaccaatcgttatatgaatcaacgccgtcattaccatatggtatatgcattttattttggtcgggttggggtgacatcctccccgtagacggtctcgagctgagtctcggcgccgctctgcgggcgctgccttcgggaagcgtttagtcccttgcgggacatgtggggatgtcttcgtgggcaaggcggtgaggtggtggcaagccgtggccaaggactcgctgcgcagaggcttcgctgcgcgctatgaccgggttcgtcgtatctggcgggctgttaacggcatggcccaggaagatgaactggacgcacgacaagaccaaggcgtagggcggactcccgagcaggactttgtactcaacacgacggtggacgaaggattcggcaggaggagcgcatgacacaagaacagatactacagatcaaggcgcgaggctacgctggacatgctgaagaccgatgcgcggacgtgcaaggagcagaacagatactacaaatcaaggcacaaaacgtggagtgttacatcgatcgacgggtaccgacggcttccagacgttgacatagacacctgtgaaggagagcgacgcagcgtgccgtcattttcaccaagaacgaggaggtgggaggtggagcacggagagcctcacatttcctggcggatgcggaaaaaggttcaaaccggaactgtacccagttgtgggtacagtagcggtttgcctcgcctgttttttacaccaacctagcaatatagagtctgggacggagtaactaggctatgcgaaacacgcgactcatttcatttcatatacagactagagcgtgggaacgagacgcctgatatatccggatttaaaagggaatcatatgtagaagactccacgttatgtattttacattgaatctaatacctgatctcatcggtgaaaacgggtattagttgtagactccaacataacgtggagtcttccacatatgtttcccttttaaatccgaatatatcaggcgtctcgctctcacgctctagtctgtatgcatttgtttgccgttatctcttttttggataaaaatataggggacccgggtggtggacccgggggtttcgcagttcgaagctaatttgtacggataccttacagggaaacgatgtactcgggcaccccctacgccttcttcacagccgcagcatctgcctaatctaccacggtacaaccaagtatacaaagtttgatcgcttattttcaaaggcattgccagttcatatacatctatcgtcacaccaacggatcggtacttcaacgattgggtttgacaaacccaccgtaatgattctgcctcctcctgctcgtcgaatgagggctccacggatttagttttaaattttgttctttgtagttagtagaacggttatcaacagcgaggtaattaccgtaatttccttccttcctgctactgaaatgtgcgctgatgcccaggcagaatcctttattgtttagattgcagtgttgtgctcggaaacttacaggtgacgataaaacaagaaaaaaacgtgcattcgaataattagcgctgccaggaggataacccgatgaagccagcaatttgtttcaagtatgatgagtttaaactgaggtctagcagatttcgatcgcgtgtaggagtaggatacaccgggtgttcggccttcgctttgacaatgtccgcccggtgcttcctctcgcacaggatgcgcggcgtacagcgacaacgtaggagcattcaaactctgtttgataaaacatggtgtagccgcacacatattttgtccgggtcgcctgaagatctaacaacaaaaaaaactgtcagcttcgattcgtccaagtgtgatattgccatttatcaagtattaatctgaaggtgctgtatgcatggacaccatttctcaatcaagttgctaagtttcccagccaggccgcaaaatgccccttccgtgagttcaaggctgtgtggtgacacacaattttcaatataaggctacagaaagtggtgatttgccgcttttcccagacttgcaaaaatcgccccatcggcatcccaccgttttgcaaaactcaccaggtgcatgaccgccctatgatattgcatgcacaggcggagggatacttgcccacaagaagttggcaccatgtccccgaatccagtaaaaagtggcccatacaccttaacataactgtcctatggcatggtagccgtttccagcgaatatacccacctgaacggttcatttggccaaccacatatgagtgcagcatgcatgcaatatcatagggcggtcatgcacctgatgagttttgcaatacggtgggatgacgatggggcgatttttgcaagtctgggaaaagcggcaaatcaccactttctgtagccttatattgaaaattgtgtgtcaccacacagccttgaactagctatcccacggacggggcattttgcggcctggctgggagaaaactgatgattgattaactggttattgctggttgtacgctcttgggaaactgaactgctgtactttgaacttgttttgacaagaacaggatcaagtagtagatcattctacaccaccagttcggtggatctctgtgggtcgcattgtagtctcacacaagacaagcttaaatcatccaagtcttcatagataaatgcctaaactagtgcagctagcctttagcctttttccggagacgacgtaccaccaggtgcagctcttttgagtctccgctgaatgaattcgttcgtcaccttataggacgtcaccgcattaccggcggatagagttgagttcggattaaaaaaaaaattgttgaacgaaaaaaaatcgagctatacttcctatcttggatcgcacaacctaggacttgaagtagttttttgcaatgttttagtggaatgttttagtggaatgttttatctaatccatccggattaattccagtgagtgtggggattcacacaatatcagcccgccgacagtttatgggcaaactcagctgacacacgattttcaatatctctctctgagaaactatgcatgcagaagaaaatctgtgtctgaaagaggagggtataagttatgactcataagttatgagtcataacagatcgaatcgataattttaccgctaatggaatgagtaagtactatgttgagtgctttgaagctgcatgtacagtacgatgcagtgatgtgataccagttgtgtccaaggtcagcatcattagcaccgatgcctcatattgatcgaaagaatacaatgcttactagtacacaatacgttgttcatcgtagtagtccgtgtcacgggtcacgtctgagacctcaactgacagctttcctgacgatgctcgaaggcgcgttagagcaggaagaggcgcgacttcaagaggagcaagggcaggacgggctagcatatcaagtgtgagtggttatcccactcttcaaggcaaagatgacgcgagatggcgggctgggcgcggaacgttcggtcgccagccgccaaggacgggtgtcatgaacgccaggaagctcgtgcacgggaggtgtggcgtccccaagtggttgcagtaggaaaggaagcgggtcggcggggtagccgtcggccgcgtatgatgtggtgaaggattcagtcgtgaattgtcctcgttgaaagcaagaaaccctttgcatttttacgagattgccttcctttcttctagcgtcgtaccagcaagctacgcggctactctttgttggccgaagtactcgaccctaacggaggaggaccgcgacaagttagtggagaagcagggtacttctcactgacaagagaggcgcctggatcaaggcgtgctgaaggaagaaggcggtggggaactggatgagttctccaaggacgcccagcgacgggcagggtggtggcgtgaccgacgggagcgagtcgaacttcgacttcgagggcgccgcggacgtgttctgcagcagcgagagcgaggccagcgctgaggaagtggcggctggcaacgtgctgggcccgatcgtggaagagcaagccgtcgggcaagacgacgaggctccaggtgcagaggcctcggcggtgcccatgggcgaggcgcccgagcggccggacctgaggatgggcgccgaggcccaggggcgtgtgagcctgctggagacgtcgcgtgggcggcgtgcgctggacgcctccctccgggagctggtgctaagagctcctgcggtggctggcggtgaggcccgggacgtgcctgcgacgacgggcgtggtggcgacggtagtggcgacgtcctcggggccaaggtcgagcgagagtgtgccgggtaaggcgacgcccgggaaatacgagcgcggtgccgacttccgcgtttgcaactccgcccgccgcgtcaatggcgggagcgagcggggcccctactccggcccctgcccctacaagaacgaggacgacgaggaccctgacgtgggccgacgtagcggcgatggcggctggtatgggaccgccggcgccgacagcggcgagcacggggccgcctcctaccacggtgtctgcggcgacagtggcttcggcggctccctcgacaatgagttccgcgagtaccacttcgacggcaggtaccggaccggtaccgtcgggtggggctcacgggtcgagcgggaatccgaacgtggaattgctggcgcgggtattgacgcgggtattgacgcgggctttgagcacgcccccaccggcatcctagggtcctacggttcaacagggaggaggaacgagtctacctccgccgacggcgggaggcacgggataggggccgactacgtcaagtgcggccgcccaagcgtatcaagctccgagcgcggcgtggccagtgagccagccggtggtgtctgcgcagccgacggtagcggcccggccgactcagagtgcgcccgcacgggggaacgtgaacccctcggcagaggcgtacctcgactcgctggtgcggcaggcactgcaacaatatcttgggggagcggctggaacggtggcggccacgggagtgccgacgccaaacgcggctccgatgcagagcgtgcctgtgcagactacgacggtcttgtctcgaccggtgccgtccgtgccgacaccgacgcacatgatggttccggcgccgactccgagcgctttgttgatggcggcgatcccctcgtacggagggctgacgatcgcgcagacgccgatgggcggaggcggggcgacgcccgcgagcgcgttctccccctcgttccagccggtgagcgcgatgacgccggtggcgagtatgccgatgagccagtccgcaggggctgcgcctggtgcctatagtgggcagatggctgtgagcgcggctgcaacgccgatgggggcggccgcgtcgactccgtttagtatgagcatgggatcgtacgggcagcagccgggctaccagcagtacgtgcccccggagacgtcggagacgtcggagacgcccgggtacggtcaggggtacgccggctacactgcccctctttcggctggtctcgctcccgcgtttggagctggccaaggtggaggagtaggtgcgaccaatgaggcaaggagtgttgcgtatggaggctcccacgtgggtggcatccccacggagcttcgcaatgcggtgaaggtgaccgtgccgttctactcggaggttgcatcgagcgaacgtgctactgcgttctggcggtcgttcgagaagtgcaccgagggcatggatgacgctctgcgactgacagcattcgagcggtgcataagggcaaggttggccaagagtagtggttcaactccaggatcgagaacttcatgacgctcaagatccgcttccacaaccggttcgtcagccgtacgccggctcaaatgtggagccagctacgcacggcgaggcggaactacggtgagtcggtcgaggagtggggcgaccgcgtcaacaggatgtgcgaggcgctccgctacaacgagccgcgcatgcggtacgagttcttcgtagagggccttcccaacaaacagttgcgtgccatgctgaacgcgagcgtggtctcgacgatcgaggaggcgggtacgctactcttgttcaagggactgcatcgaccggtggaggaagaggacgagttcgccgagagcgggaaggcgtccggcggtggtaagacggagccgtccaagctggccgatcaggtgcacgagatgatgaagcagcagcagagggcgctcgcgtctgcgcctcaggctccgcgttctcctcgccgaccctcgatcaatgccgcggcgccgacacagacggcggctgcgagttcgggtgaaaccggtggtggtggttcggagcgtcaactccatattcgcatggcgcctgacacgcgcacccaggaaggcgagacggtctgcggtcgctgcgagcgacggaactgcagtcgcttgacgtgctcccgaggtaagggggcgtgcaaccgctgtggtgagttcggccacttctccatggaatgtcacttgcccagaacgccgacgaatggcggttctcggggcaacggaggaggtggtgctcaaggccaaaggacaaggcagtgcggcatgtgtgacggcacggaccacttcatggcgaagtgcccgtacaaggcgcagttgaaggatctgctcaagagcttggccgggaatgaccccgcagtgctagcggaggccctgaccgagcgtgaagagggcaggaagagggggaaggaagtgtcgctccttcctcttgcctgacgggtgacacagcggagcacgtcgtggcggcgatggcggaaatcggcgaacggttgggtgctctgcaggacgaaggcagcgcgtcgcgtgacgaagacggtggcgtgctcgccggggaatcgacggaaaatgttagtggtgaaacagaagcgaaggtaggtactgcacacttgccgatgaaggactggacgacgacacgagcgagaacggcgaagccgaactcgtcgtgctgaaggtggccgcggacgggcgcgtgaagagctccgtcacggtgaaagtgaacaaggaggtggtgcgtgcgggcaccgtcttgactggaatgcgcgtccccggagcaacgaagagctcgggcgcggactgcgacaaggaccccgacggcgcgatgaagaacgccgtcgtgggcaacatgaaagaccagggcggtgcgaaggagggcactggcccgaatgatatggcaaacgcgggtggtgcgacggaaagcactgtcccgatcaaaacggaagaagcagcatcgggtctggacgctggagggttaccccgcgaggttacctctggcacggacacgctggaagattgcattgaagatgctgaggtcgcgcggctggagcggttctccaccgtgaccaaggcaaacgacacggccgagtcggatactcagggccgtgccgaggagggcggaacaccttcgactgagagtaccaagggtagagcgtatcaggctcgctatggacgcctgttcaccgaccgagagctggagctgctcgaacagggtgagtatgggctggcgagcgacgaacctgaggagtacgacaaggagttggaggaacggctgttcccccgtgacgaagtggagatgaagcagcggatgcaggagaacgccgcgaggcataaggcgatgagcatcgaagagatgagcaagatgctcggaattccagtcgagaagctggagcggacgaaggaggtggcgcggcgtgccggctccacgcccgagtactggctggaatggtacgataagacgctggcggtgtccagcgaggcgaagcgcgccaatcgtgacttcaaggggcacgggccctacgagaaaccagaagcaaagtcgacaggcccgttggcggccgtcgctgacagtcccaacccacgcgaaggagtcgtcgaggccacgagtgccgcggctcgggtgagcggtggaatggaaaaggggattatcgagtcagcgagggaccacgggaaagatgaggctgcggtagagcaggaagtcgtgagaaatgtgtgctcgagtctcgctaagaacgaggcagcgtcggagatcgagaccaaggacgagatggaccgtgaagacaagacggtcccatttaccagtcggtcggtgatacggaaggtcgttcaccgacggctgaagggttggtgagggacggtgaggatggcgccgacggcaaggtgcccccgttccgtgacaagaacccagccggcctggccgaggacgagaaggagtggctacgtgggcaactccgagtctcgttcaagggggtcgacgagaggcggctgcgggtattggcagattggtccgaacgatattacgccggggaggcggcggccatctgcgagaagctcaagctgcgcgcgaaacgaggagtggctgaggctcgcgtgggcaaggatagtgccccgggcaaggccgagaagcacgtgtcgttccaggtgggcggcacggtgtgcgtggtgaaggggcctcctgagcgagacaaggctctggaagaggatagccctcactgtgttcacgtgatcggcgccgtggggcggccgaggcgtcggaaaccggggctaaggcccgtggacgatggggatgaagacgacgaacgagtcgtccccgaaggcaagcgcgtgattggaagtgtgggtggtgttgaggccctggcgggaggtttcatcggcgacgtaccgacggagatgatcatcgacacgggcgcgatcgcgagtctggtggacaagaaggtgctcaagtggctcgggcgttctgccgagacgttgagaccgtacgcgggcggactggacagtgtcccggggcaagaggtccagatcaagggcgtgatcgacctgcccgtgacacttggctccgtggggaagttgttgccgttcgcggtcgtgaaccgcctgcacgtcgattcgatcctgggcccggactcgctgcagtcgttccgtgccgtgatcgacatggaagcgcagacgatgacgctcaaggatacgggcgaggtgatcccgttgggcgaaactcgcgtggaggagtcgtactccgcgagtgttgcggcgaccgtgcatctcgagcccggctcgcaggcgttggtacgatcgagggtgcgcggcggcgccaggcaggctccgtcgtgctcgtcgaaggactcgctggcggtgaggcgtctctgcgagtggccaggacgctgtgcacggtgcatcaagggcaagtcctggttggggtttgcaacgcctcgaccgaggagatggtcatcagtgagggcgccgtgatagccgtcgcgtccgccgtgcctgagtcggccttctcgttcgagcgtgaagagccgtccgggtcggaggacgtgagcaaggtcattgggtcggtgtcggccgagacggatccgtcgcaggacgcccgcgaggcgaagatggagtcggagctggccaaggtggctgcggaagacctccaagccgacttcagcgactcggccatggacgccgagcagcaggagctattcgcgagcatgttgggcgacttcaaagacatgttcgtcgagacgtcgaagcgtctggggcggacggacttgctacagttcagcatcgacacgggggagcatgctccgatcaagcagcccccgtaccgagtgtcgaaggcggagggtgacgtgatggaggcggagatccagcagtatctggagctcaacctcatccggccgtctacgagtccgtgggcaagcccagtgttgatgatacgcaagccggatggtggaattcgattctgtattgattaccggaagctcaatgcagtcactgtgaaggatagctaccctatacctcttatcgacgacatcttggacgtcctggggcgggcgaagctcttctcgacgatggacatcgcgtccgggtactggagcgtgcccatggagcctggaagggtcgagaaaacggccttcacgagcaagttcggcctgtacgagtggctcgtcatgccgttcgggctgtgcacggtgccggccttcgagcgcttgatggagaacgtgctggtcgacttgaagtggaggacgtgtctagtgtacttggatgactgcgtcgtgttcagcgacgacttcgcgagccacttggtccgcgtgcggcaggtactggagcggttccgagcggcgggcttcaaattgaagatgaagaagtgccattggggtcgtgcccaggttgcgttcctgggtcacatagtgacgcccttgggcatactgccccacccggagaaggtgaaggcggtactcaacatcgcgaagccgtacgacttacgcacgctgcgtgccttcctcgggctgacgagctacttcaggagatatatccctgggtacgctgcgatcgctgcgccactggaacagcagaagcagaaggagacggttttttgctggggtggagactgcgatttggcgttctaccagctgcagcgcagcttggtacgcccgccgatcgtggtgtatccggactgcaccaagagattcaagctgtacgtggactcctcgcacctggcggtggggacgtgcctgatgcaagaggtggacggccgagaccgggccatcgcctacgcgagcaagatgctggtggggtcgcagcggaactggatccgcaagacggacggtacaacggagatcgagtgctggggcgcggtctgggccacgcggaagttccggtgttatctcgaccacgcggagttcgacctgtatacggaccaccaggccctgacctggatcttcggtgagaatacgcggacgacgaacgcgaatttggcgcgctgggctatggagttgtcccagctacgcttcaagattcatcatcgtgccgggtcgctcatgggtcacgcggacggcctgtcgaggcttcgacagcggcccgttattggcgcggtgaccatgaacgacctgctcaacccgcccggacgtctcgaaggtgacggtccgggccggctacgacctttgcggcttgaagacgtatggatccctgcggcgacgcccgaagggcgtggcgccgacgaagtcgaggagcgttcgggccgagatgagggccgcggagaagggcgacgaccgctgcgtctggaggacgtgtggatgactggagcggctgacgacgagggtacggccgtcgaagtcgaagagcagcatgaaggcgatgagcgcctgagcgagcgggtcgagccggacctggctccgagagcggacgagcgagataccgtcccagccagagagcggggcaacgacgagagaagaacggaggtcgcgcgtgactccgaagaggccgctcgaggcgagggtccgcgtctcacgcaggaggagcaggaagaggacgagggcggcaggacggaggcggactctccctccgtcgtggactcgttcgggctcgacagcgagaagttcgtcgaggagcaagggcggactccgtggatggtggcgatgaaagcgttcctcgagaggggggggctctctcgatggacgtgcagctacgcgtgctaattctacggatgtcaccgaacttcgtgatgaagaacggtgtgctgatgcgtcgcgtatacctgacggcacgggctggaccggcgagcacgatcacggtgccggtcatcccgttaccgttcatcgaaaccgtgctacacttctgtcatgcagacatcttttcggcccacttgggcaagacgaagactatagatcgggtgcggcgtcacgcgtactggcctggatggaagaaggacgtggccgagtacgtgcgctgctgcccgatatgcaatggcggaaaggggtcgcggccgtggaaggccggacgcatgcagaggatgtcgatcatggacttgtcggtgtccgttctcgttgttggtcgtggacgcaataggcccgctgcccgcgacggagcgcggcaacaagtacatcttggtcttcgtggactacttcaccaggtgggtggaggcgttcgcggtggcggcgctggactcgatcacgttcgtggacgtcatggtggacggggtgatctgcagacacggggtgcccgagcggctactgagcgaccgcggcacgaactttacgtccgagctagcgcgctcgctctaccagacgcttggcatcaaaaagctgttcgggtcggcgtaccacccgcagacgcaaggactggtcgagcggttcaacggcgcgctgctgggcatgctgaggatgtttgtgcacgagtctcaggacgactgggacgtctacttgccgcgtgtgttgttcgcgtatcggtcctcgtaccatgaggccctcggcgactcgccgttctttagcctctacagccgagacccgaagctcacgctggatttggcctttatgaacaccggttcggactggaagtcgagtgaggtggccgcatacaggcgccagctgtaccagtcactgcacgactcgcgacgcatggttgagcgccagctggtcaaggctcaggaccgtcacgagagacggctgagagggcagaaagaggtcgtgttcgcagtgggagatgctgtgtgggtgtaccagctcttccgcgcgcgaagaggggagcggaagacgaagaagctcgcgttcacttggcacggacacaaccgagtgctcggccaagtcggggagaacgcgtacaggatcgacatcccgagccatcccgacaaggtcgtgaccgtgaacgtgaatagactgaaaaggttcaaggggcgatggagccgaccctttgtggacgacgtgcccgaaggtgtggacggctcgcccgaggtcgaagaagaagggcctctcgaagaggacgacttaccggagacgagcttcgtggaacgcgtaaccatcggcggtgaggagacggcgttcacgaacgcgggctcgcctgtgatcgacattgtggggaaacgcgtcgagaagaaggaggtgcagtatttggcgctgactgcaacgtacgagacgttctggctgtcacgcgctgcgctctcgcccgagtatgacgtgctgatcacggcgtattagaacgccatgcggagacggaaggtctacctgaactacggcgaagcgtgcggctaatggaagccaacgccttggtcgacgaagatgagctcctcttctggcgttggggtcgtgctcgacccacgctaggaagatggaggcggtaattgtggatagcttgaaggggaggcagtgtgcctcgaagctcgtgaggattggatattgtgttttattgcttttcgggaactcggcttggagatgtgggcgtcttggggaatgcggcgctgctgtgaacatggaaacagagacgacaagatgaaagaagactcaagttgaattaatcggaattacgggaattagcgtggcacatgcaggcgtctgggggacgcagaaacgaaggacgccttacgcgtcgtcagcagcaggggcgagcgcggtcggcttgccttcatcgtcctcgaaatcggagaagtcgccggtcttgatgtcggagggcgagaacgtcgtgatcgacgtgggctggcacgagccgtccttgatcgctggggccaggatggcctcggtttcttggacaatcttgctgtcgatcagcacgtgccatggaccgacgtcctcatctcccacccagttggcgtttctcggcgcgtcgctcttgatgtccatgcggatgcgtgcgagcgcgtcgagggagagacggtgctcggctggggccttcgggtcgagagcgcgcgtggactcgagtaggtggcgtaggctgtgatagccatagtcgtcgatcagcgccgggttgagagcgttgtcgatgacgaactcgaagcgctccgagtccgtgcggtagagcgaggccaggtcttcggcgcacacgccgttgtcggtgcgcttctcgccggagcccttgctgccttgcccgccgtaccaatacaggtcgtcgtggccctcgagcagccggtaaaagccgaagtagccccaagtctcaatgcagagactggtgaggcggaggcgcgcgatggccgctcggagcttcgatttgcggcggttgtccgtgtccttcttgatcatcaagggcgcgttgaacgcccagtgccagaagagcgcgcggaacagcatgtagaaacgccagtgctcgcggtagacctgggggtactttaccgggtcgtaccagaggctgcggtcgcaccacggataggcgacccgctacggcatcttgccctcggcgacgcacttggccagcacggcagcgatggcgtcacggacggtcttgcgcgcagctgggctgacgcgaagaatctcgtcgatgtcaatgggctggacctcgtcgtcggtctcggcgcgagcctttttgctggacggcgtgctcgcggggctgggcgacgccgcgcgtttgttgctgcggcggggcgccttgcccttgcccttgccggacttgggcggcggcggcggagagcgcgacttgggcggacgtggcgacgacggaggatcagcgggagcggcggaatcggtcgagggaggagcggaaggcagtggcggcagcacgaagatgagaccgccgaggatcgggtcttcctgctcctcgagcacggcgccgacgactgcctgtaggtgctcgagtccctgggactgagggttcgcggagagcacgcagcgcacgcgctcccagaacgccgtcttgatggtgcgctggtccgtcccgagagagtcatcaagaagcccaatgatgagctccttgatttcctcaatctcctccgccgagaatgcgcagcgaagattggacatcgtggcgagtggcgagtggtacgtggcgagtggtacgtggcgcgtggcagattctcaaatgagagattcgccgaaagagcggctgcatgctcgccaggagcggtcctactaagttcttgcagaacgttctgaatggagtggagtgcgataacggcgtcggcaacttgccgaagaacggacctgatggcagttgactgcggcaacggttggttgcccccccccctgcattttgcgaaactcggcggcagcagctcatggacgattggccgctggccgtcacgatactcgcggacgtgcgtgactacttcgagaagggcgtgcatccgatggtgtgggcggcgctgggcgttgccgcatggcacgtcattacgcccgtgttgaacgtgttgtgggtgtttggggcctcggtgcgcgagactgggctcgtactctacttcttcgggttcacctgcgtcgacaggtacatgtcggcgataaggagctcgcgtgtccaagggctggaagcgtcggaatacgcgtgggctgcgctatctctactggtggtggtgccgattgctgtgctgcgggagcacgagcagcttttcggcatggttggggaaatgtggcatgcttggtgtgtggcgatacatcaaacggcgttcttgttcctgccggatgcaggacaactgatgctgcaggtcgcgcggcgttaggcgtgtgcgctcggcgaagcggctgtggctggccgtgtaagtgatggcgcctacgtgctgattgcgctgtgtgtgtccgtcgtggttcacgcacctcgcattgcgtatgacgtcctcgaagtactgctgcacgggtcaacgggggtcgctgtggtgctcggcgtgtggaacgcctggtgcggattctcgctggtgaccacgagggtgagcggcgtgctgctgctttgtgggctttacagccatctcgtacgacgctgccacgggcgcatgccgacaaaggcgccgaagaaggtcgcaaggtcggggttggacgctctgcgtgagcgcaaggacgcgagggtgcgcgcagagaaggcaagtctcaacaagctgcgtggcgtacgtcgtcggtcggcggtggtaccgtcgaagccggtgacgaacgggccggaggtggccgtggtcgtcgacgaggcggacgggcaaggtccgacgtgccccgcgactgcgacgagcgaggacaagggcgaggctggccgaggacggcagcctgaagtcggggagagttgtcacgggtcacgtctgagacctcaacggacagctttcctgacgatgctcgaaggcgcgttagagcaggaagaggcgcgacttcaagaggagcaagggcaggacgggctagcatatcaagtgtgagtggttcctggcgttcatgacacccgtccttggcggctggcgaccgaacgttccgcgcccagcccgccatctcgcgtcatctttgccttgaagagtgggataaccactcacacttgatatgctagcccgtcctgcccttgctcctcttgaagtcgcgcctcttcctgctctaacgcgccttcgagcatcgtcaggaaagctgtcagttgaggtctcagacgtgacccgtgacatccgctaatacgcaatacgttgttcgtcgtagtagttgatggagccccacttcctctgatggcatctgacatcaatctacagtagaaggaaaaaaaaagaacaagcatccatcaaaacctgtcagaccgattgctgtatgatgttgtgtgaatgttgtttgatgtcatccgcacggggtgaaatgacgaatgtagcgtgaatgtcgttcgatgtcatccaaaacccttccccaatcgacagttcttcgaactgcgaattgttttgcacctatttggtatttggtcgtttaccatcacttattactgaagccagagataacgaagacgacgaaggaagaagcgcgcgtgaagacgaagaaggaagaagcacgcatggagatttcacttctgtgggttgatgcgcgccagcccgcgcaggctctagttatgaagccagatgacatcgtgtgggatctcttcaaggccatcgaatccgaaaacccaacgttcttcgctggggttttgccctgctacgtgtttctctacttggccaagcaagaagacggagaatggatcaagacggaagggccggaagcaagggcgttgatggctggtcgcgggccagttgttgaggccatttgccggacaccgctgatgtttcacaattcactcgacacacacttttccgatctgggaagtggcaacacgcatttgcttgtcagggcacgaagaccgccagaaatgctaggaaagcgcacaagggaagcacctgagtcattcgatgaagtttcctacgaggttctttggtgcagactcgtgggcgattcagccaggtccagcttcccagtggtcatcgatatgacaggtttcgtgtacgacctgcaggttctgctcaaaaaagcaagattcggtgatgacgatgaagttcacgcaacagacatttattcatgtaaagcgacggaccgcgaggggaactggctgtcgagattttcgcctgacgtatccgagttcaaggagatccagaggtcgacagaagtgcagatctttcgaaaggcacttcaccctgggctaaaactacgagatgtatttcgctctttaggtccagacgatctcaacgtgatatttatgacagcgccgatgtaggtcgtggtccctaccttggagcactggcacctcacagaatcgtaccagtatgctgctcgtgagttaaacgccgacagcaaagtggaggagcttgtggagaatgtccagcaaataagtgaagtagctgcaattaatccgtaccttacccctttcgtcgtcttgcagaactcgtctggcaccggcaagacgcaaatggcgtttaatctcatggctcggaaggacgtccaagtgctttatatttgctgtggacaacagcaaggaggtgtggagctggcatttggacagcgttctgagtcgtttttgcgctgtatggaaaaggatctgccaggggtatacgacgcaagaatctttaccattttgccccagatgaatttgtacacgtttggcttcatctgggcgatattgaccgggagatcttcgttcatggacccaagaaggcctgtagaagttcggaaggagctgaaggcgcggccgaagggcagcaggcaaattgttgttttcttggacgagttccctcgactcgacaattcgagcattcggaccagcgacattgcgcgtcggtttatgctgaacgtgttccgctcgtttggtctggctgtggttttgaacaccactagcggtgccgcgagagatcttgcaacattggacattggtcgatgccttcagcagagcggcagactgtggtgtaccatcagaccaacgcttctagcttttcggccacatcatgcgcaggtaataccgcttgagttgcagctaatttttcggaatagtcgaccgtcatttgcggcgttggtcgtggattatctgtccaaacacccatttgctacggatttcgtgagctacatggatggaattgctggcactgtggcgaatgcgtttgctcccaaagagcggtttgcgtccgaggtgtttagagtcggtcagtcatcgctgttcctccgcgcaagttatggtaccgatgatttcacaagcaatatgaccagagctgaagacacgagtcacctcattggagaccatttcgctcgtcttcatgaaacggcaccattgaagctcgcattgggttgtgaagaccatccgagcaactttgacggtggaccagagccatggcagtgccacagcgagttacccacaacggaggaagactgcttgctgcacctctgtttatccggcggaaagcattttgaggccctgaaagattctaccgggacatctattccgtttatccgagcatttctggacgctgaaaaggctttttattcagtgctgaagtaccttagtaccgaccagagtcactacgaccgccttcgactggagatgttggtagctggcgcaattgtagcatcaagtcaccgaaatggcttcgctgggatcaagttcccagagtttttgtctgcgctgccgtatgagctgagaattcagtcgtcgccagatttacagatccggtttcccgagaccttagcagagtctgtggtttctctggcagtccccttccttgccttgcctggaccaactggccagatcacctaatgcggacagagctaaatgttggggctttcgagatggaaagaaacgagaatcgaacgaccatgtgcttgctgggtgggaggataacaatggcgtgttatcaggggcgaccgcaactacgccattaacgacattttggagcatattccacgtaaaagtgccgtccacctggttgtcatgaagtccctgcttagtctttgttttcgaaaacaagacaagaaccgcaagaaacgaatggaagatgtgctcaagagcaaggattccttgcatcacgcaaactactatcgtgtgttagcctccgaaggttgtaccaagtcggggcgcgccgatctggtagccattcgctacatgaagaatgagtgccgctcttctgtcccctgcgaacagccagcatgcaaggtggaaaaactcgttctcttcctcgaagtttcgaagtagttggtcgagcatgatctttacaacatatgcgtacggttaataaatcggagtattacgggacgtgttaagttaatttgctagaaacacagtttttgcattgctggcagtgccgtattaatacattcagtgctccgagtctgagcatgtatcaggcttccgcccagttggtaagaatagatttatttttttcgagtcatttcatttgaatgaatgattggctggatcatgaataaaatatcctgattggcttattacacaattgacatcgccgccatcgaccatggtgcgtcgtcgtctcctgcgcctcttgctcgagctctctacacgcatctgacgcttctttcactgttcatttagtccgtcacattgcacacgactctgggcgacatcaagatcgaggtgtgctgtgatacggcacctcgtacagccgaggtaggctcataaacctcgccctactgatacttttcaggtcactaaaacatttctatcgttatttttgcagaacttcctggcactttgtgctagcggcgcctacgatggcactaaattccatcggtacatcatttttacagttgtatttgggatgacggtgagctctaaatttaatttttttcattttattatgacagcaacatgaaggggttcatggtgcaaggaggagacccgacgggcacgggcaaaggcggtcagagcatttggggcggaacaattgacgatgagttccacccgcagaacagagtacgttgtcaaggcggtggacattttggagactgattaaccttatagttattctttttgagcagcacaactgccggggcatcgtgtcgatggccaacagcggccccaacaccaacaagcagcagttcttcgtcacgtacgccaagcagccgcacctgaacaacgtctacacggtctttggcaagtatgtggagatgattttgtttttgtcttagataacgatctgtgtgttgaatgtactcgcggcgtgcgagttgaagtcctgctggttatcaactaactgttgtgagagacttaaaaaataaatactaacccttccacgtgacttgggtgttgcgcagggtcatcgacggcatggacacgctcgacgccatggagaagacgcctgtggacgccaagaaccgaccgctcaaggagatcgtgatcaagtccgtcaccatccacgccaaccccatcgccgatatgtgagactgggacaagcagacccgtagacagcggcagcgtaacagcaaaaaaccatccgctttacacaaaacgcgtcatgaagagcgtgatgtcgtccggcttcttcgtctgcatctcggccatgagcttgagctgcatgagcgagtagtggtgcttgcgcgacggtctgcgcagcatcaggtgccggtcgagagtcttcctgcccttgtgtcgctccataagctcgcgtgcgacttctaaatggtccacaccgctagcgtccaacggagcaccttcagccagcttggtctcttccagtgtgcgttcacggtattccagagccgccgccgtagcgaacggatacaactgacgttcagtagtagcgccattatcaatattctcgtgcacctttgacaaattcacaagctggtcacacacgctctgcagtcctgtgcccttcgagtcccacagctccggcgccgcgagtgcagccgtgatgtcgtccttgtagacattatctcccagaccatccgagaacgtaagacacacgtccccctcctgcagaccaaagctctgcaccacgtagtccttgggcaccacctgttcccgcaagttcacgaccgtcggcacgttgaactcgcgcagcaccgccagcgtctcgtagacgacattgccgttcctcaccaccaagcacttgcaatctccgagcgagaacgtcatcagcttccccgtccaccggttaaagtacgacactgcaagggtcgtggccagcctcgacttcctgtactggaagcagttgatcctcgccgtcttgatagcgtccaccaccgcgctctcgaacgccgcctggtccagcggctctctgttgtggttggtcagctcctccagcatcacctggacacacctcaccacctccgcggacagaatagcagacgacacgggtgctccgtcgtaattagcgagcgactgtcgtccaaagggggacgacacgccgtccgccacaatgtggaagtaggcggacgctgcgccggcgtcctctgcgtggaactcgaacgccgcctgtgcgtgttgcagctggtcctgctcgccccacctgaatctgtgcgcgcccacgggcgtggctcttctaatggggttgttaactttaatagctccgggcaatcgccagcctccgtgggcacctttgacactggatttcttgataaattggtccgattgcgagcggaacatggccagcttctggtgcgtccttgaggacaccgagtggaacgcgttgaccagcgctcgcgcgggcgactggggcgtctgaggacgctggaaaaggtcccccaaggaggacgcgcgacgcttgcccgacgacgcgcgcgacgccggggacggcaccggagcgggcacggaggaggcgggcgctgtgagccacacggcgtgctcctcgtcgcgcgtggggggcggcatggaggacagcacgggccgcggaggcagcagcgcgcgcggcatagcaaggtgttaagtggagactttgggcttgcggcgccaaatgtagaatgcgacgtttggggtagagacggcggtcttcagtgacgtttagggtaaaggtggcgttcttttgcgtcacgggtggaaacagcagatggctcggaggagcgacggctgctgggatttagtggcgctgaggtggaggtttaggctaaaccttgcttctcaaaaaatgcgctaattgagagcttcgttggcatgtcgtttggctggccaggatgtatcttggggggcaaagcgagtttttgatcatttgatcatgctctcggtggagaactcgcacatagcggcgggcaatggcgttgcaaatgcaaggagagaggcagagaggatccagcgagaagctcgaccggggatttggtccgccggcgctttgcctcgtgccactcacgctgctctctatggacactgactcgactgcggtgctgtcgcagggtctctgcggaggcagctcatgcactttggccgagaaggccgagccgtggtcgagttaccaacggcgccatgtgtgctcaacggatggcaagaacgaggggtgacaggcgccaacgggctgagctgagccgaggtgaacgtgacgagcgccacttggacgtgtatccactgtgcagatgcattcgcggcaccgactaagacgcactttcgctccaggtgccgggcgctgctgttgccgcgtcatccccttgtatgcatttggacaatcaccagcagtgagcacgaacaccacaccacagcacaccacaggcaacaaccaaacgctggccgtcttatcccttctcgtgccagcaaagaatcgagcccccccccccccatcccgaccgaaatgattatgtggcgcgcggtaccctcgttgaacgagcgccgtcatgcgtgctcatgattatcggttggctgcggtccgagtcgacgaggatatcatcgccttcttgcagtcagtcagtcagtcagccgcctacctcacttctgaaaacgcctgggctccaagagaggaaggaaggaaggcctctgctggaataactcagccatggcggcggcagacccggcggccaagcgccgcctgtacgcgtggatcgcctacaacgtcgctctctatgctgcgatcgtcgtgtccggcgccatcctcttcatggtcatggtggggatgattaccgtcggcggcggggacgcggacgtcaaggacgactggatcgaggtcaactcgcagatcctcaacggggtcttcacgtggatggcaatcaccaaccacccctttttcctctaccgactggtcaagacgctgcaggtgctgggcgtccggcgctgggactgggcgtcgccaatggccacgcgcgtccgagccgcgcgctacttgagccgccacttccccttggtgttcgtcgacacggtggcaatccacgaccacaagctcgaagcgcaagaggcagatgacagcgaggtgtacctgctggcggaagcggaagaagcggagcagctggaggaggtcgcgtacgtccgcagcgacgccgagcacctccgcaacacgttcgtgatgctgaactggaactgcttgttccagtacccgatcacggctgttatgtgggcctacaactcggacacgcgccccgggttcgtcattggcgtcttcctgccgctctccttcatgtgcaactttgggggccagtaccgcatctataaactcaacaaggacatcaaggccagacgagcgaacgccgtggggaaccccgacccgaatcctaccgagatgacgaacagcgcggcggaggtgtaagctcagctcggatgtaattttttactaagtattgaagaacgtaaggactgcaatcccattttcaacaacgctgcgcacgagtatctaagcaatgatgaagaatgcttgacactgcggtcaaaactgcgtagcgagtcatcgtcactaccccgtggttcggcgcacaagtgctgctggattaatgggcaggagaaaagttccgtgataccaagccggtcatgaaaattactagtatccttttagatgacttccggtaaagaattgttgaagtcgtcggcgtagtaatcgatcactttcggcgggtggtggaggacgtgttgttgcactctgcgatgatctattgtgtctcaatggtgacgccgatattcaaccttgagcgcggggtgataaaccacgaaaatccacttcattggagtgatctcgttacactggtgcattatgatcctgtccagtttggacagttcctagtgcgttcgtggttactaatcgatcgggcaagattgctacagtacagtgcagaaagattgatgacgctttcgttatccaagaatcgataatgccgaacgccagcaagttaaacaaaggcgaaagcgaccccggaacatttcgacagataaattggccacgtacactttcaagtaaaatactattgctacttctgctatccggatatgcacgtagtctttcattgtagtgtagccttttgtagaattgtagagtgtaatggtaagggagagaaccttaagctccaatgtaatgccttgatacgatacgaacaggaaacgaaaaacttttaaccaatccgcccggatagctcatcttcgggatgaatcggcctttgaatctatcaacgcgatggacggcagcccctcgatgggaatggcatcgacagtggaaatttcagtctttaagttacacattccaacctaaagcacaagccgttcgctctgtcagttccgaaaatgcgtgctcaagtttcgattgccactagcagccaagccagcaacatcatcgcaatgatgctaagcacctgcggacaacgttcaccatcctgaacttcagctgtctcttccagtacgttatgacggggttcatgtggggctacagcccgatgacaagacctatcttcgtactgccagcgctgcttccacctacgactctgtgcagcgtcatcggcgagtaccgaatcaaccgtctgagcaagaaaatcaaagaacggcaggttgtcgtggacggcggggtcccaattctcggagatctgtcaagtaggcggggcgggatgtcgcccacttagatgtctacgctcagatgaactggtcgtgttaaaacagtgaggttttgtactaggtatcgttggaatcatacgtagctgcactatattccccacgtcacgttctgcattcatcttctcaatgtcggacccattttaattaaagcgctgtgcacaaactgtcgtatattcctaataatgctacttgatccttcgcattgcaagtttgcagcttgccatagaagtgcgattataatgtaggtatgtgcatatcggtggactggatacgggtgccacattggtgctttaagcccttaaggcccttggactgatgttgaaagctggtcaccagcactgttccgcccccttctccttcatgccgacaatacagagcctgctcaatccgtatgcaaaaagaaaggaagccagccatagggaaatgtcaaaccgagcgagcgttgatggcagtaaaggatcgttgaaatggacagtagagtaatcacgtcgaggtcggaagtggtacatgtaggataacacaaaatttagctccttgttcatacccgtgaagcctgtcattgatccgtctgtccagagagaaagcgagcgagatccatactacgtttaccaaagctttaagatcgtgtccagcaccggtagtggacaggtgctcggatgcgtgtggctactaatcgttgatgatgatgtttctgttgtcccggtaagactgtacagtactcgcatgtataaccaaccacccgccgcggcaaagtcattctgtttcacttcgctttcacgtctggctcattgtttgatgcatgcggcttctgtaagtataaccccatcgtggaaggccgtatattcattcttggtactgtagtgcgaaagaaaatattttcttttttttaaaagaaaatcatttaaaaatgaaagaactattatatatcaggcggtttagagaagtttgaggctcgcccttgatccagacacagccatgaagaaatcaacatttgttaacccaccgtaagtactgtcgtagagtaggtatgatacagtgccttctggactcgatctttacaatcgacggcaactccttgacgagaattgcatcgacggctgaatgtttatgcctcgagccaacaagccagtcgtacacgctgtacatgtactgtgccacctggactgctctgttcgtactggcatttatcgtatgccaagacaaccatcacttccgaaaaagcgtgctaaccaccatcaccaaggcggtcatattccaacatgtacgtccagcctgatcaaacacctgagccagctacgcccattctggaagagagccacaggcaaactaacgagtcaaaccaacaatggaacctcgcgtcggtagcatatcactctctgttgaatgccatcgccatcgtcgctggtgtatccatgatgctcgtgaaagctggcgtcctgaacgtgggagacaaagccgcccaggacacgtatacagagtatgcctctcaagttgttaacggagtcttcacgtggacggccttgaccagcaaccctggctacatttatcgagttatcacgctgtcgcgggtgctgaaggagaaaaccaagttggagtcaagaagtcaagctgtgcgctatttgaacaagcatttccctctcgcattcgtcgacaccagtcctacgctcaccaagactacactagacccactgaagtcgcaacgcagggttggtggcgctgatactgatacgtacatgacgtccaagaacaaactcgtggtttgtcttggaaacatcgtattcctccgcaacgacgcgaagtatctacgaactaccttcgtcattctgaacttcagctgcctcttccagtatattatgacgggattcatgtggggctgcagcgcggctactaggcctgggttcgtgttacctgcgcttcttccacctacgcttttgtgcagcgtcattggagagcaccgaatcaaccgtttgagcaagaaaatcaaagaacgacgagttgttatcggccacggggtccccatactcggagaaatcgccatcaaacgcgagtcgatgccgcccgtttagacgtctacaagtagttgttgactattgcaagtaaaaaaagcaaaaaaaattaatacatgtactgaagcagtttccaggaattctcgccttgtcccaaacgaaaattctccattcatcgttccttagctcaaggcaaaaaagaagagcaggaagacccaacaatgtcggagtcgtcaactaccgcggattcgcgtcaagtcaagcccaagactgctttgtacctgagcgtacttgtgtcgctgctccaacctttccaaagcggttggtcgacatcccagctcaatctggcccagttcaacgacacggctcagtgcaatgctcgccccgtagcggaaggaacatgtttgacgttccctggacactcaaagctcgaatggactttcgcggtgaacgcgtggattttcggcgccatgctcggcagtttattctgcggaaggttcagcgataaatgggggcggaagaagcttttacttgcgaactgcgggttcatcgctgcgggagcggtcgtgcagagtagcgtctcgaacatttggccgtttgcagttgggcgtctcattgctggagttgcgtcgggtgttgctacgggtacaatcggcgcgtacgtgaacgagctgtcgtctccacacttgcggaacatcctcggtctggggcttcagatttcggtaactttcggcattatgatgcctgccgtcgccttcttcttcgcgaatacaagcactggctggagatttctcgctggattccccttggtactggccgcattgttcctactgcttgctccgtcactttgcgtcgagagtccagcgtggttattgatgaaaaaccgtcgagaagaagccgaacacgtgataacccgactgtacggcgtggagaacgtgaataaagtgctggagtggctggagactgccagagagaacgagcagagcttcctgagcgccaaggaagaggcgaatgagtccacgtatgaccccaagtatcgcctacaactggctggtgctattctgctgtcgtgctcacagcagttatcgggtatcaacgctgttttctactactcaagtgagattttctcggctgctggcatctcggacccgcgggtgggcaccctcatcattgactttatcaacatttggccggcgtttttcactgggtatttggctgttcgcttcgggaatcgcactatgattttgtgggggttggcgggtatgttggtcatggcggctggcatgacgctggcatttctcgttaatgtccctgcgctttccgtcctgttcacagctctgtacgtgatcagttttggcgtgacgctgggcccgctggtgtgggttatgacggctgacatgttcccggatgcgattcgcgcaagcgcgtcgtcgctgtgtattgggattaattggctctgcaacctcgtggtgggggtgtcgtacccgtatctggctgatgcgttgagagactacagctacgtcccctttgtggtgttgctggctgtgttcttctccatgggactgaagctggtacccgagacgtctggtaagacgagtgcagagatccagctcgagtacgagcagcgccgccggaagtgaactgtgtccgaagcttggaatttactatcaagtacttggtacggttattgtcgcagcaattatggaattgatccttgggtacgttttagttgcattgattttgtttaaatttatcgcttcttcctgacaaaaagcttaattaaaagctaaacgagtacagatgtatccccttccctgagggatcaactcaaatgtaagtggggacttcgttattcataaataatgatttccatttttattaatcaatctgtcatttttaaattatttttttcttttacgaaaaatatttattttagattatttattttaacttttatttattgcatatattttaacttttatttattgcatatattttaacttttatttattgcatatattttaaccttattatattgattttttaaaatttaaaaactttaagtgctctcattgccggacagtagatttgaaagtgtcttgcacaaacgctggtacagtgctgtatatgtaaatgattgttgcacgctccattttttctcacgaagttttgtttacgttcaaaattaggttttaggttcctgatgtttgagagataaacttcttacagtccaaagacaagccgccacattcatgaccctctatgataggacctcgaggcaaacggatggcaatgtgcatgtacagtcagtattattttattgcacaagtgcattcatgtgttgcaccagggtacgcacgcagttcctcggtaactgtgccttaggtccagtagcaagctactgcctacggaatcaaaagcttgtccaatcaccaaagttcggagtttgcagaacagattcggaccaggttttcgttttcatcgcatggtttatcgcggagcatatgacatggatgttgtacagtacggcacggtgcagtacatgtattaataccaaaaactggacttagaaaagacaagataaggcgaatctgtaacaattctcaagtcgagaatatgatgattgtggcatgtgctcatcttgaccgaaagtttactcgttggtgccggattcgctgttcgaagctcttcattctgctttttgccaccactcagaaaaagccacacagctaattacactacacatacctatcgatgcgcgtgtgctacgtcctattagctgccgcggccgccctcctcgcaagccaccaagttgtcgccatttcaagtcgcgcggaagtgtcaagagtggctgcaaacgaagagatccagtcgatcgacgctgctccgaacacacaggctgctgaggaccggcaaagctgcggacgaagagagattgctgcccctaggtgtggtttcgttgaaagacctgacgagagtggatgatcttgtcgataagaagcaatttggggctttcctcgggaaaacggaggatgccatcaacaacaggcgagctaccagaatatcgagaccacgtgctgaaggcattcgacgaggcaggacagttgaagtcgctcagggtgggttggaactggtatcgcctctacagaggcaaaaagtacgaaaaacaaattgaggacgcggctgcggcgcaaaatagaggggatctcagagatgcaaggttaatcctagctctctgagatttatttcagagaagattgcgtttccaggtcagaatataacaataggaaaatacttcacccgtagtggctgcatatgaacttagcgaaaagtatcaatcgtgcggcgtcgttgggtgcattgcgtgtttttgttatctcaccaattttctactagagcaagcgacccacccaagtcgtgctaagcttgcccgcgctattcaattgccgcagcaccactaaggcctcaaggacgggctattcgtagctccaacttaataaggttactcgttcgaattacgaacactagtgatactaccactataggaacccacggtaatgctcatcaaaaacaaactgtgtgggcgcctagcctgcttggactgatggtatttctgtggttgcggatgttggtgaacgatccgcccgagcgtccagtcgggtgatcgctcccacgggcgccccgctccagcaacccaagagtcagaaggaaaacgctgctactgatgccaccaccgcggctgacggcgatgctcccaagaagggaagaagctggacgagcaaaacggcccatgcaggcacaggcgactccgataaggctggaagcaagcagataagcaatcataaggcaagctgcagccgccccgtcggatgctgatctgctgctgcatcgagacgagttccagcatcaagtgctgagctcagctcagtgagatctggcgcacaggtcgtcttgttacggacccgcatccgcaggttggatgctcaaggtgaccatacttagtcggggtggaaaggtgaacgtggacattttagcttaagtagtagaagggacactaattatacctaacatcgaaactagacgagtaaagtggcgtagtattgtctgtagcgccatacttcttcctcaaattccaacaccatagtaccaatgagaataaacacgtaaaaaaactcaacttttagagcttgttcgggtcggaggcactacttcgtggtcgtgaaaatattatcggcaagaatacacaaacgtaagagctttggaacgtatctcgatgaacagttgtcgactatacgagtcatccggaggaatcaactgcaagtctacagctctatcagttggatccccggtatgacttacagctcaaacgagacatatgcgatgaactgaaaagtaacgaatacaaccacttactctattgaagctgccgtactcgcactactcatactagatgagcaccactatcatttttttaaaagttgtgtattacttaaaagttatattgccgcttgcaaatactttgccctctaaaatagaccacgccggtctcttaatatgagtggacacgagataggcgagggctgatttagctttatgctttgctgggggccgcttttaggcccagaaactcggtttggcccgtctagaatggcatttctgcgtttccaagtcgtagaaaagcgccttggtcgagaaaacagagccccaagctcggatcttagaccgtactggcgagatatataaatcagacctaggttttaattaagagctggccggattaaaatcgagattattaacgagataataagcatgcgttggccaaaatatctgcaaacggcaatacacgcgttacgcgtaaaatggtctagttcgaggttagagggggggggattctaagaggtgttcgaatttgtcgattatgttaaaaggtgagaaacatgctgatacagtcaaacctgtttatatgatcctctctatttgagccatgccgtttatttgatgcaggctttgtcgctaccaaatgtttcacttagtttttgtatgatctctgtttatatgcatacaaggtatatgagtcacatttttagggaccaaattaggtctcacctgtttatttgattcacactgctcacggccacacactcttcaaagcaccactgctcaacactcaacgcctaccgcaagccttcttcgctcgccatgtctcctcgcacctgactgacgctagaacaaaagctccaagtgcacctaaagctcaagcagaatcctggcatgaacaaccccatgctcgccgagtggatctacgcaactttcaaggcccgggtcagccgtgccacactcgcccgactgcgcaacctgccttcttcctacttcagccacgtcgacctgagtgcgaccaagcggcgccgagtgaaattccctcagttcgagcgggaactgagggaatttttctttcagaacgaagctaaaacggcgatggcggacgacgtgctcctgctgaaggcgcatgagctggcggtgcgcttaggcatcgatgccacgcagctccggctaagcaacggctggcttcaaagctgtaagaagcgcaatgggacccgctcccatacgctacacggcgaaggtggtgctgtagaagctgatgaagtacgagatgcgaggctagagctacaagagttggtggcgcagtttacacccgataatgtgttcaacttcgacgaaacggcgcttttctatcgcttagcgcctaatcgaacgctagctacgactattcgcaagggcaagaaaaaggagaagcaacgtttgactttggccttctgctgcaacgcgactggctccgacaagctcgacccaatagtcatcggtacggccaagaacccgaggtgctttagaaagggagcggcgattaaaggtaaacctatattgtacaagtcctccaagaacgcctggatgacatccgtcatttttgacgaatggctgcacctctccaacatgagaatggcggccgccaatcgcaaggtcctacttctagtcgacaatgcttcatgccacaagattctacgaaacctgactcatgtgactgttcacttcctccctcctaacatgacatccgccgtacagccgctggatgcagataaatattttatctgtattgtggtgtagcctaaactaaccaactctattacgatgttatttttattcaggtattatccggtcgttcaaggctcggtaccgaaactattttgtgcggtggtgtttggatgcacttgaagctaacattacacgcaagctcaacgtactggaagctgtccaattctccattgatgcttgggcgggtgtgacgccaacgacaattacaaattgctgggtcaagactcgcattttgggaggaaagatgctaggaaggacccgtgctggcacggataacattgaggaggtatccagcaacgagatggaggagttaacggcgatgctatcgaggtgggagggcgctgttagcgctagtgagtatctggcagtggacgaagacgttcctgtgcacgagccagatgtgctagtggacgaagtggcaggaagtgatgcagtttcgcaggacgagcaggaggaagaggaggaacaggaacccgcaattcaacctgccattgctctgagacactgcatggagctggctgcatttctgctgcaatgcggagagcagactgacagagaacgaagagctttacagaccgtgaccgctttggttcgagagactacggtgaaggcaaagcggcagcgaactatgcacgatttctttacgtgcaccacataattttttttaactgagtccattttatatgagtcattgtagtagatggtcaccaacaggcctcatataaacaggtttgactgtagttgtctgttggtcagcagcatcgtaacttgtaggtttgatcatgatcatgttgattatcaacttcttcaattgcagctttcagcttgtttcgtacccttattttaaataaaataatggtctaatcttgagcccctataataaattgtccagttagaagatacagaggactcagaagatccaagcgtcaatctttctctacagtcgaccgaagtatgtactgtagtgtgcacgtctgaggttgttattattttaaagaaaatgtgcaacagtattaggttggaggatttcataataaatgcacaaatactgaggctcgcctcggccgctgttcaaacactactgtaataccattggcaggaattcgcaggttacttcgtacttctataaagctacatacggtaaccaccttttggcagcggagagttatgatgtttcataaaggcgagtgggtcgccaagtaacctacatataccggtagttctgtgtcatactctggcccagagggccttgctcaaacggtggtgaagtacatgtaggttgcatgcaaatgattcttgaacggattttacaggacattaccaggacacacaaaattgtagtattttgtccaatcagaattaaattaacatagcatcgcagttttccctgtgtttggcctcaccgcaacagcaaacatgccataggctgccccacctgcacaatagtataactttacctcttcatcatcaagaaaagctggccgagactgggccggcgtaggcggttgtaatttattgccaagtcggcgttgaagcacgctaatacggccagctcttcttcgacaaggacatcgtcagcgatatggcgctcaacaaaagtctagttctatgctcaccacccacgccaatgactccgttctactcgtatcaggaaacaaagtggccgagggcttcgagtacaggtgattcggtctcgggtggcatgctggcctggatctcgacgggcaggagatgacgcgcgcagaccagcaaccatcaagactgagggctcgctacggtagcgtcgtgggcgacttcgttgaggacgatcacgatcacgacaactagctggtacggcagctctggtatgggcgttcagcggaggctcgaacgtgggcggcttcagcgggtcagaccctaagggaaggtgctgcaattgctcttcgctatccagggacactacacatacaacagtcatggcaagcgtcgacacagcgtgtgcccccgcaattaaatgttgcgattagcactgggtaatggagagctattatttgtacatctttcagcgttcatatacgtactggttcgactcggcgttactgctgacttagtttaaaaaaagtgttgagaatgtatgaaatgtatggctgagcttagatttctttaactggtacgactaaaatgctccttggtctacagagcgagccatgaatactgtatcttcctggtgggcacgctacgctaacggacaccacgtgtgtgttatattctgcttggcgcattagctcggaagtttgctgcattgcgggtgcggcatccgcaatgcagcaaatcttgcaggacaacatgtcctgcaaaagcacaaaagattgactttgccaagcttgtgccaataatactagattttgtgtaggatttgacgccgggatgtttcgatttggaaaatacaggacattccgtcctgcgcttatgctcgtgagccagctgcaaaatctggagaatgattgttgcacgcgccatttttctcactgtttacgcccaatataggtgtaggtgtcgctcaaagttgggcaatctgtatgcttgagccgtatcccgaattgtgatatcccctggttagtaataatagaatggcggacagtaaacgatgttcatcagaacaatcaccttgtatctaacgctttggccacgtattgagtataatacaaactcacgaagtgcgtacaatggtggcactgtacctttcgacaccgtcaaccccaccgctcacgacaagagcgtctaaagtaccgtcattatggtacaattacaaatctagataaatagcgatgccttttgtaagtgataaaattggggtctcaatgagaagcctatcactacggagaggattgtctttcctggaccatcccgacaccatttatcaattaggcttaagtctacacagcgatacagcgatatcaggactctatagcttaatccaacgtaaataaaggacctcaaaacacacatgattgtctttactgtaagagcggcgagtgccaaattgcgttgccgactgaacagcgcggtacagtagcttgccgcgtccattgttctggaaccagcttcgaagcgaattgatggtacgtatagcatatgtacggtacggtacagtacagtacatgtataataggtacagtattatagcaagcagtctccagaattgatgtttacatgtacgaacgcttgtgcactcgcaaaagttggcagctcgagaacagattcggaccagctttcatttctttcgcatggtttatcacagagcatatgacatggatgttaccgaaaatatgtacatggaaaccaagttgaaagcatacaacgacacatcctaggagcccaacagctctcgacttgagatcatgattacggtgtgggccttcccactgacgggaagtattcgtcagtacatggatttgatgcccgaagttcttcattctgcttttcactcagcattcagaacaccacccaatcaactacacgtgccgatgcgcgtgtgcttcgttctactagcggccgcggccaccctcctcgcaagtaacgaagttaccgcggtttcaagtcacgcgggtttgtcaaaaatgactgcgaaggaagagacccagacgatcgacgctgcagcgatggctgccaccggacacaggcacttgaggtctcacgaagctgcgggcgaagagagagcatcggtgcctgtcaacgcgatatcgttcaaagaccttttgaaagtggaagacctagtcgacccgacgaagctccgggctgctctacagaaatcagcggaagcctcgaagatccgattggctatgttcgacgaaatgtttggcaacgcagatatcaaaagggaggtgttagcccgcctcaacaagctcgatgacttcaagcctctcaagtcggcttggacggtatacattctaaaaaaaggagtcgaatacgagagacagcaagaaaaggccgtggctgcggccgcggctgccagacgccgtggaaactaggtcagaccactggttagcttaccccacagaggtatacgtttcaccttttttccgtacttttctggctttagtacgtaccaatactgatcgcagcgccataaagacctctgttggtctgggagggaagtgtaggtaattctccacctcctgcgaagcgcgccgtggatcatgcatttaaaagtgcgtcgacaatacgaggcgctctatcttggtgatccgagctcgaatatgaccgccgtcgctctgttctagggcaaaaattcttgaatcgctaataagcattacttcaagtaatgctcaaattcacccggggttcctatacttttaagtaagtgtttgtgagcccgaccgtgcgatatcagggcaataagcatagcgacacaaaaagtattaaattataatacactatcgtagcttcgatacggggtgcctgttcacatgccacgctgtttcggataacgatggtgatgttgggataagtctgcaaaacgtatttgcagggttttgaaggccaactgcagctagcggcgcggccacaccagtagcttctaggttaagttttgctatactttagtacttagggccattcctaacgagatcaccggggcatgatctcggctgtggtttggggtggaaggaagcatgatctcaaagccgttcctaacgagatcgtgatccatgtccaaatacataacgaaaggctcgagttcgcgttgagggcggccgccattatgagcttcacgagctgtgttcgtgtgcatttgcgatcgaacgctgctttgcacttcgacaatgcacttgatgcaagctgcttcaatgtggctacagtagagaatgactgcgcaaaactgcagtagtgctataagtacagccttctaggttccacaatagctttaacgaactccttgcactcatagagtgtacactcgggcgaacattagtcaaaaccgtggctacgaaggctgctggagtctaaatcctttgacggcatttggcagtgatccgtgatccgagattggggcatgagccattgcttggatcatggggtcatggcaccaggctccatatgtatctattttagccaatcaggtagcataattacgggtccacatgatcccgttaggaacggcccttaacagtaaatactatcttgccccacatcttgctaaatggccttctacataccggtaatttaagctagtcggtatttaaccggtatgttagtgctccagctcgagatgtccggattctgagcacgccaccccatcatcattgcaagcgaggcctcaaacccgagcgtcatgcctaatacaatagttgtgcctttagttaggcagtgatgacttttttttagttttcattcaattttcaccgttattttacttgatgcacgtacaaggcaatactgcggctgcgaagcagggacaggagatgcctgcgtatcgtaaaagaagttcctcctagctcaaaacacaaaaaaaaacaaagtcgaagtacacgtattccgaaatcctcctatcccggccttcgctgagccctgggttgtgtatcattcaaggagtcacaattgctgtttgaagctagtctataaacccgcgtatataattttggcgggtcggaacttcgtattggttattggcatcttatcgctcctgagaactgcgaaccccccggaccaccagtccgggtacctcgaatggggattagctgtccatagttttgtcacctggacagaaccattaatttgtatgcgagctcctaaagatgttagcggacaaaatcccctcggtagtcataaaaccactttgttatttctagtggaaggtgctcctgtcatggggtgccccattgagatgtcaatggtgcaccatcttgaaccatacaaattcataagtatataatatcgtacagattctacaagcttttagctgtacaatgatgaaaacaaattgctcaatctattggaggacacaagattaatgatgttatcgatccatgagttcggtgatacggaagagtatgaaaacacctaccagcttaataatggctgctgaacacgatgtaggtactgatactgagagcaaacgaatctggcatgataatattaagtccgtagacaacatcctttggattcgaacggatgcaattagcactggtagtagcaggtcttgtgcgcggttccgtaagatcatgcgagcattaacacatgaattggcaaggaaataaagacaagaggagctagtgtcctagctcaacttatcagacgtcctttacaaattggacttctaccataagcacctcagaacattcatattctgtgcatttgcattcattattacgaacggtgaggggaatcattattaatacttggatttgtatatcagaaatctgttggagtcccaacttttgacccacacttatatgcctgataagaggtatccttacctggggattactaccgaggggatcgtctctaaagatctttctcgcgtgtttaccttgaaacgattcaaattgacaagaatacagccacctggattaaatagggatgtccttaaacttttgtcgtggagtgtaccgcaagcaatcgcctgttcagatttgaaacgtgtcgcctatgatgatacctacatcgtacataaggtacatagtttttagttctggataatatctactgcaccagaatgctccatttctgcttcgtgtaatgtcatttcttgtacaaagtcgatctgcaggtcggaacgctagaccgaagtgtgttgtagagatcagtgatggccaaaaaagtattgcaggtattgacatttaccaatacttattgcaatgccatactgcaagcttgcaagctattgcaatacatgttgcagagcgctgcggaattgcaattcttactgcagtcttaagccaaccgaattaactcttcaaaccctagtacttttcacttagaagcaggcaaggctgtcaatgtcaagataataatgtcctcaaaacccagttccgacggcatatgtgctatcggcgacctctacgacgacagagtagtatggttattagtattgcagtaattattgcaagaacgagcagtattccagttattattgctggctgccttggtactgcaattcatattgctacagatcgctttatctccaatgccttcccgtacatttttggccatcactggtagataccagaaaatgctgctcgatcttctagctctaaatgtatatctcagaggtctcgaacgtcatgagcattctcatcatgcatgcacggttggagccggacttacgacaagctagctgttgggattggaggagactaaactggatcgtgacgcgggaaagcatacacaattgaactactggccctcaccctcaacctggactaacggaatcgttattggtagtacatgtacagtgatcttggttgctctcgcattagcacgttagtaacgtgtctgatgaagatcggtttaaaaggcaccctcctactgtttgtattcgtaggtgcaaaccgacaagctttgcacggtccagtggagcggaatcatgtccacgaccatgcgaatacggaacaacgtgcccttcgaccccattcctaccgattcgtatgagcctttcggcggtagttccaggaaactcacgtacttgtcaaggcccgtcagtattgactgggatcgacctgctgtctacatggcagttggccaaagggggtgtttgtgcctggggctttcctcctcgtgcccgagagtgtggtacgttgcatgtagttgagtgtggttggctaagaaaagaatgaatcactttggaatttgcctcactcaagacaagagccacttctccctcgtcgactgcttctcctcgacgtcaagactctacactactcgctgctacttccgggcgccgcgctgccacactcaaggctcgacgctgttcgtctcggagcgcaataactgctagattatgagcccaaagctctaactgttggtgacgagtctcttaaagtgaaagcgacgcaagaaacaaaatgagcaatgctggagctggcaacgtgcaaggccagccgcaacaacaagcacaacctgccgttaatccagcgcgggctagcaacaaagcgccccggttcgaaggcacgtttgagctctatcgcgccaaattggagctctatcttgcagagcgcgactcgtgggctgtagtgagcggcggggagacacgccatgctacggatgtgggcctgcaacgccagtatgacgagcgagatcgaattgcacgtgcggctatcctacgcggcctgcgcggatgcaagaatgatgatgctgccaaggtgtgtggaatggctacggctgcggaaatgtggaatacactggtggcggataacacccaacgcgacttctcctacgcggtactcctgcggcgaccaaattgtatcaaacctctcataatgagggccaattattggccgagtacatcacgacaatgaggcaacttcggcaaaagctgcgcaatatgggcccggaccatgctattacggacaacgacatggcccagttgctgctgatgggcgtggcagtgacgcatcctgagttactggaccagttcgacctgcctacgcgtcaaggcaacccacccacgctgctacaagtgaccaatgctctaagatccaaggatgagcgtacacgcatggccgagcaagtgggtgggacgcgaaatggaaatggagtggtgatgaacacgatgagggctggaccacctgtgaagccgggtctgaatgggggtaacggtggcaagaagagcaagtgtttccactgtggaaaacctggccatttcaagcgggattgctggcacttgaagaaaaagtcgaaaaaggtgcaagctggcggaaaggagatcaagaagactgccaagctgtcaaagaaaaacactgaagggaaggccagtaaaggagatcgtgcagagaagaaaccgggagtaatccagcacatgctgtggctgaatggcagtgctccagatgtccccggtcgcggatcgaccagcgacagtagtagtgacagcgacggcgatgaagaagctcctgccctgggaatggttgctggcctggctcgtgaaggcgcggtgggcgcttggatgctggactgtgggagcactacgcacgtgtgtgttgagcgagggcaattctctagcagcaagaagtcgaaggcaatgttcaaggtctggaccggtgaagtcacgcagggagttatgagtggatccgtactggtcacagctgctaatgcccgtacaggctgcggcaatgaagatactgtatacatcaagtggagaacgtggaatattctcccttcggatcggtcaatttgatcagcctcggcaggatggaagaagctggctggctcccatcattctctccctcctcgtttgtgcctcgcaggtgctggctggaccgtggtcagcaacggctcgagttcgtaaagaagggtcatcattattggctgtacaccacagaaatacccgctccagaagacatggtgatggcgagtgtcgacaacgatgccagtcctcttatgtggtggcatgagcggttaggccatctgaacgtggctgccattaagggaatgttgactcgcgaagtggttgtaggcatggagataccggaagagctcttcaagaagttctcgtgcctgacctgcatgggcgccaagaggaagcgcatgtcgtacaaagcaagcgctgccgagaagcgcaccaaagtcaactatgagcgcttgagttcggatgtctgtgatatgcagaagtatctccccggtgtgagcaactatcggtacttccagctcatccaagacgagggatctcggtataaatgggtgtatccgctcaagcagaagagcgactccaacgccaacttgatggagctgatgtcggagctgcgtgcgcaggggcacaagatcaagacgttcacaagcgacggcggaggcgaattcgtgaacaaccagctcaaagggttcctgaaattacatgggattaagttcgtgcctactcaccggcacacccctgaagagaatgcactcgttgagaagctcaacggtgtgctggtgaacaagatgcgcgccgcgatgcatgcagtagacttgccgcagaaactctggccggaagtactgcggtatgtggtggacattgacaacatgacggcaacacgggcactcaagggcagaactccgtcggagaagctcttcaacaagaaacctgacatcagcaagattcgggtatgcgggtgtgtttgtgccaaaagcggtgcgaaagcacaagttgagcccaaaggcagatccggcgctgttgctgggattcgcgcgctaaactacgggctacagactgctaaatttgcggactggaaaaattgtcgaagcccgagacgtacagttccgcgaagatgccacggtcagtagcaagtacctgaacaagctcttggtgggcagacatcagggcgagaagatcccgtacgtgccactgccagtggagtacattgctacggacaatgagcgtgatggtgctgatcgcgcggtggagaacagtctaccaaaggaagtgactccgagtcacggtgggtcagcggtcatggacgacgcgcacgggcccgggggagcgacttcgtcgagcagcgacgagtcggaagtgggcgaagttcacgacacgcgagcgactggacatggtgcagttccagcacatgggtcaactcagcccctagcaccaagacgacgccaaccacggcgtctgcaaccaggaacaggaaccccactagcggcaactcgagcttcgcaacgtgcgaggagaccaaatgtccgacttcgagattaccagttgatggtggaggagaaatttgtcggcgacccagcgacggtcgaagaagccctggcctcgcctcagcgagatgagtggttggctgccatgaaagctgagtatgatgccctaattcgaaacaacacctggaagctgatcgacccaccgaagtcgttgccaggacaccccgtcaagactctcacttcaaagtgggtgttgcgcgtaaaacgtgatgaacacggcggaatattacggtacaaggccagacttgtgatacacggattcaagcagcgctacggggtggagtatcgtaagacttatgccgcagtggtgaggattattacgattttgctggtgctcctgattgcgctgaccctggaactggaggcaaggcacgttgattttgataccgcgttccttaacacggtgctgaagaagtttgttatcctgatgcaacagccggacttcttccaagacggcaccgatcgagtatgtcggctgttgaagggactttacgggctgaagcaggcggcccggttgtggtatcaaatgctacacaagtctctggtgaagctcggattttctcgcagtacgtttgatgttggtctctactacaagtgcgttgatggacggatcattctcatcacagtgtatgtggatgatatggtcatcgtcgggaagccacatgacatcgaccaagtcatcgctgatttgatggttgaatacgcgttgaaggatctcggccgcgtgcatcacttgttgggaatggaagtgcattacgagcccggtgtactgttgtgtatctcccaaacagcgtacatcgacaagattctgcgccgttttaatatgacggaagctcgaacggtgcgattgcctcagatgatgaacgagaagggtccggcaattgaaactgacccagccaaagtgaacgatccatcgctgccttaccaagaattagttggggctttgcagtatttggcaacgggcacaagacccgatatcgccaatgcagttcgaactcttagtcggcacaccagctgctacacgaaggagaactacgcaagtgccaagcgagtgcttcgttatcttcgggcaactcgctcgtttggattagtctacaggcgcggtgatgctgctccgtctacaagagcatttagcgatgcagatcacgccaattgcccggattcctctcgttcggtgactggatttgtgcttcagctgaatggatttagcgttggattcaagagcagaatgcagaagagcgttaccgacgacacgtgcaagtcggagctggtcgctgccagcatgtgtgtagaggatttgctgtgggccaagaagctgctgaaggagctgggactggatcagcagagacccgtgctccagattaacaaccagagcacgatcaaggtctgcagtgaagcaggcaactttcatggtgtcaagcgctacgctaagaagagtcgcaagattgcagaacttgttgaagcgaagaagctcaagatgtagtacgtgcctacgtcggataatattgcggatatgttcaccaaagcgctcggaccacagcagttcgagacgttgagacgcttgcttggagtcgaagacgtcgttgctgcgatcgagcagcgtgtcgtggtggagaacgcgcagttgaagtcgacgctggacgtgcaccaagccgatgctgaagacgacaaggatacgtgagttccgggggagtatgagcctttcggcggtagttccaggaaactcacgtacttgtcaaggcccgtcagtattgactgggatcgacctgctgtctacatggcagttggccaaagggggtgtttgtgcctggggctttcctcctcgtgcccgagagtgtggtacgttgcatgtagttgagtgtggttggctaagaaaagaatgaatcactttggaatttgcctcactcaagacaagagcctgttctccctcgtccactgcttctcctcgacgtcaagactctacactactcgctgctacttccgggcgccgcgctgccacactcaaggctcgacgctgttcgtctcggagcgcaataactgctaatgccgcttagcctgtgccgctatctaacaacacgctcctgaggagcaactggaagtgtgatccaagaagacgatccaaccccagcggtaaagaaagaaaaggaggcgtcgacgacggcgacgacatcatcgacgatctcgtaccaaaaggcgaagccgttcgaggagccggagccgtcttcggtcactgagaaggctgcgaccaagttcaagccccaactccacggtgccacgcctaccctgctgagaacgaggccggtcagatcagcacttggctcaaaaaggccgacgccacgcaaaaagcaagggttcgaagctgggctcgcaagtctacggtcgctccgcttggttcggtcgggtgtgggctatcatgtacgcctggtgcttcccagacgtcacccccgactgggaacacgttatcgtgtgaacgaacaactctaatgtcactgaccaggtgatcctagcggttacgacgtccagctcaaatggcggttacacctcgcaagccccccccccctgacgcgagtatggtgagcggtaccagcgtcaaggtcggctacagtgacaatacgctggcgagtacgacggaggatggcgacacgcaggacctgatcatgtggcaccagctgaccgccgtggcacaggaggcgctcaacaacgaccaaagcttcgacaacgtgcaggtcccggtgaatgacgactatttcttgcttcagctcgcaaggcctggccgttcgcctgaaaacaaggatatataggtgacttccaacggcaatgcacggtacgctgtgcaccaccatggttttacaccagcctgtgcatctgctacgtactattaaccatttaatgtgcgaacccttgttgccttttcgtgtattctttacatgccgcgctaccgaaacacgtacaacacattcccatctcttttcttctgcaaaagtactcacaactccaattggtctattactcgatgtgcgtctcgattagcttcggatgcacttcaagagtggcagtggcaggagggggtgggttaagtgcatcgagacaccgagttcgaaagcaagcgggttaattggtatcatgagctggttaggccgcaggctggctactaccgcgggctcgtgtccggaaggcacgcatcccgtaggcgaggctgcagcagcgcgcagtatcgggggtagatagccgtctaaaccgcaacaaatacaaatagaaagggttaggctgcaggttggccctggggtgacatactagtccgtaatttcagctatctgtgctcgtctgtacacttacagagcaacagccccaggaacattagtctcactagttaaggtctcgtaatacggcgaccaagcatcgaggatcaaacgttgttggggtttaccaatccgactagcaaaactgaggctagcgcaggtgtatttaacaccgaaagcattgcattgcagcttagtataaggaaacgttgtggtgactctggtggggacggatacggtcgaaattacgatcttgctgcattaggggcccgtaactgcctgttcatgcccttcgcagttcgccttccagagagcacctgcaactttgcaagtcctccagtcagatcaaaatcaaaatcgagccgattcctcttcaagtgcaaggtgtcaacctcgtttgccgccgctggcccgctgactgctttgcataggaagcggcggtgtctttcctcctttttcttctgccaccgtcgctactttctttggctccaacagtggtgttggccgatctcttctttatttgcctcagccatgcttggtttgcttcatttgcctcctgctcttcttcgtcattcggtgcgtcgtaaattgggtaaattaagatcatttcctccaggctgcgggcaaacagtgtcaaacgataattcgcaaatgtttgcaatttttaccagaataatatggctgacccacaataaaagctgaaaagtaaataatgtgtaccacacatctctcactccaccctgtctctacccgcaacacttgcgcaacttatcttccggccccctcgcgactcctccttttgccagcgaagagagaagtgaaaccgcgcggaagcatgagcgcccccatcgatgacctgctcttcggcggcgacgactccggggacgaggacgacatgaacagtacgtgcgcgcgcgccccctctctccacccgcacctttcccgcctctaacaacgctctgtacgccgacttacgcccggaaacccgtagcctccatgcccgccatgcgctcgtacagcggcgtcccgctcgcggcggcggccgtagcgcccccggggggtctattggcgcccgcctcaatagtgccccctggggccaagcccctcacgccctcgggcgccacgcccatccgcccacagccgcagccactggcgccttcgcccgcccccgctgcgtcgccccccgccgcgctgccccagaccaagcaggcgcccggctcggggcagcaaatgttccagcaaatgttcgcgctgctgaagcagatgctgcccgtggagcagtacgccacgctgcactcggagatgcgcaagggcaacggcaacgacatcaagtccatcgtggacatcatcaagcggatcgcgggcgacgccatcttctccagtgtcatccagaagatggaccttacgaggaccttccccactaccaacgcaccggtaacattgtgctgctgttgagaggtgttgagggataccaactcagttttgattgggatttttgttgttgcagggtgcctttaatgctgtcaagcccgagcctggagttgctggagttccagcgcccactgttgcgtcgccggcgtcgttgggtagaccgctggccgcgagaaccgccgggatggcggtgccgacgaccactacggcgtcgccgaagaagaccatgcctactgctattgcgcccaacacgcggccgattgctgctgccccgccgactctggcagccgcgccggtggcgatgccagcgtctattgctgctcaggttgcgagaccgacggcgattcagccgccgcctgggacggtcagcaccccgccggccaaggctgcggttggtgtgaagccggagccggcctctactactgctacgtcagtgggagccacgtcgacgactgctactacttcttcacccagcgccgcttctgctgtttcccagtccaggaacgaagctctggagaagatcatgttcgcgaagcggctattgtctcacgctgctacgtgctcgttgactcacggcgtctgccaggttaagaagtgcgacgacgtccgccgcgtgttcaagcacagcttgtcttgtggaggtgcgaatggctgctcacattgcgagcagctgaagggactggtgaagtaccacgccaaggaatgcgctgttggtattaccgatcactgctcgatcccgttctgtgacggcttgcggcgcacatacgctcagaaccaggctacgttggcggcgaaggcgaaggcagctcaagcggctggacgaaaactcagcggtatggggagtgacgatgatgatgacaatacgccgctgtcctctgctgtgaataaggccaagaaaaatgccaaggccaagtctcccaagagcacgcctactcgagcgccggtcgcccacccgctgaagcgcaagatatccaacgcatcgcttccgagaacaaattctcctgggccatcgtcgacggtgtcaacacctgtggcggctgcacagactgcaacgtccaccccagccaagccgcagcagaagaacgtgaccgccaatatgacacaggagtatggacgcctgctgcagctgattcttcacgtggagaagtgtacaaccagcgcatgtcctgttggcgaagagtgtgcggagtcaaagtcgatcatgaagcagataaactctccgaatcccccggtacgtgccatttgcgctttatcgacggtattgacctgaatgctaatatttttttgtttgatgctagcaggcccgcgctaaaacttacaagcaagtgtacggacactacaagacgtgtgtggcgaagaataacacggccaactgccccatgtgcaagattggactattgccgattctgcccgcagctagcccaacaccgtcaccccacacacaggtccttaaggctggggtacccgcagtgaatacgacgccaggatcggccgtaacctcttcgccgtccggtgggttgaacaagcggagcagcagtgctgtgtcgcctacaccgcgctctcctttgaagaagccgcgtaccaattctacaagccgaggcaaggctacggctgcagaggtggcagctcagagcgctgctgcatccgagctggtcagtcaagaacttgcccaggctagtgttgcagatattcgcaaggaggcggatgtgcttacgcacacaaacattgagctgggcacggaacggcggatcatgatggagggaggtgtgcgacgcgtgcgcatggcggagcagttgccatgccagaaagaagagtgggtggagaaagacttatttaattcggagaaactgcgcacccagatgcgcgaggtcggccggcggtcaggtgtcgagcttggagtccaaacaagcgaagtgatggcttacgctctccacgagtatctcaagcaggtgatcgaggagatggtggaaatttccaagcagcgtggtgactcgtacgcgcactcgcttgaggcgttgcagaaggcgcagagggtaagagcgatgatggacggccggcccggaaaccacatggagctcaccgcgacagatattttgcgcgtaagttgtgaggactcgtttgccaaattgcggcaggaggacttggcactgcgatcacagttactggaggatgcgaagcgtgaagagcagatcgagaaagagcgcgccaagaagcgcaagaaggtggatcgcagcaaacttaaccaggatgagcgtgacgaggccgagatggacatcgaggagctggctgtcaaggacctgaaggagcgtctgctgcagcaagacaagggcggcgtggtgaaggtggacggccgagtcaacgagagcatctcgacgaagtatgcgccgcgggaggctgacagccaggtgaccatggacgacgccacctactggctgcagagccagaagccgtacatccgcccgaagctcttcgtgcgtgcagaagctgcgcgtatcgtgaccaagtcgcttatctgatctgcagaacttcgaaggcgttcacgattccagccaaaccatgacggctcatgcaataaattaaaaaagcaccctgctgggcccatcgcagcgtgcggtgtctaacctcggtgtggggagcgtgctgggcttttcttcattgctggcggactattcgaagcgcgagtggatgcgcacttcgcccttcttggccgcctccgggatgttggccgtgcggaacgcgtacacgtcggactcgatcatcgacgctcctgcagagcaagcgagcagcaccattttgataacggttaggaacaaaaaatacgacagcaccttccactgaagcttgtgcagtagtaattacctggaattactgaggagtccgcgacgtagatatcttgtccgtcgttgcgcagctccacgaagtgcgtgcgctgcttgacacccttggatttaagtctgggcgacgacggctgcagcttgcccgacggggtcatggccatgtccacccccttgtagagcccctccccagtctccactgcaatatggtaggcgtgccatggacacttgatggtcgtcttgccgcccatctcctcaatgtctccattgaccagaggtcctccgtggtctgccaaggtaaagttaagacaaaaaatccaatatacatgtacagattattacttaaccaccaccagaacgcggatatcttccccctccttacggtaacaggcttggtccatgcagaacacctgtccccggatattgagcagcatgacgctgcggtgcgaggtcggcagctcgacgcatttcttggagccggacggcagctccaacagcttgcacacgaactcgtacgtcaacaggtccgccatgtccgcagtttaattgggaatgctcggaaaaaatccaattgggtcatttcgtacttaaatgatttacataatgtatggatcgatactgcggcgcttacaccaacggagcttcaccgactcgaaagctttcaccgtcgccagctacggtctgtcctcaatgtgcgttacccataccacatctccaacgctgatctctacgcaacgtgtgacgagcggccgctctgtcaccggatcacgtcttcggcttctcgggcacattctactgcgaccacaagatatcccggcgtttatccagatgaaggcgtatttctcttcctcagacagcagcaagtggagaggtaggccccgtaccacactgcctcttgtccttgatcaggaccttgatgctagtgggtgtgggtaccgcctccgcaccagctcagacttggagagacttcgactgcttgcccaagaccgacgtaaatggaaggccctcaagactaccattgctgactcactgccagccaaaggagactcgacgtatgcggacaccacactatgccgccgactagctaaactgagactagcgcaggtgtaatttggctacgcgaacacgtaaatcattgcattgcaatgtatggattgattacgcccacgcgatgattagtcccatttctgaagttttagttgtcggacgagtcgggggcgagcggcatgcgttcctcgactttgggaggcagcggggcgatgactgcatggtgcttggacttgttggccgagaagtaggagcccagcttggtgaagacgcctgccagcacggacgcagtcatgagcgacagcgcccacacgccgtagcctgcggtgtcgatgatgccccccatcatggcgccggacaatcccgtcgagaaatagccgaccgcagtcatgatgccagacgcgccagctgcgatatcacgagggagatccgacggcacggtgtagctcaagagagtgtagttgcctagcaaaaagacgctcgacaggaagatgaggccgccgagcatcgtgacactgcaagtggcgctgacgaagtagatgaccccgagcatgagcgcttgaagcagcgagaagatgaagatgggcatgacgcggtcggagtggaaaataacatcactcagccagccgcagaggattcctcccacgaaaccccctaccgtccacgcaccaccgatgatcgccgtatcacttgaagagagcggggcgtcgcgtacagcgtcgaagaaggaaaggaaccagttgaggaagccatctcgagcccagcagaggaagaatacggctacgagatatcccaggaatgtgtagtcccgcatgagctgcttcatctgctgcttcggcgtaagtcgaaccttctcgtcttcgtcctcgtcttctctttgggttgaggacgacgttaatgtgtcttttgatatgcctttggccggattcttcagcgtatccggtgtctgttgctgtggagcgacaaggattaattgcttcgttgtgtggttgtgcgtgtcggacggggagttcttcgcgtagcgtgagatcacgagcgccatttcgaagagcactgcgcccgggataacaaagacgtagggccagcccaacgtcccaatgatactgcttcccgtgcccagagccaaaaagtacccgcttgtcaacataatgttgaacacgccagcaaacatcccgcgctcgctcggtgcataccacgctgcgttgattttcacaacggcgctggtgccgaacccttgaaccaacacgttggccgcataaagcacgacgaagagtatttgctggacgactccgggtgaattcaagaggaagagaccaccgaggagaaggttgcaaattgcagccccgatacacgcgacgagcatgcctcgcttgcctccaatgcgatccgtgatttggcctgtgaagggaccgctgatggcgtacgcccaggagccggccgacagcaccctagttacacacagaaggttaacaaaaaaattatgatcgtctaacagacaaaacctaccagcccatgtacgatgaggtaaagccaagtttatcgcgcaccgccgagacattcccagcagctacgttgtatctcgccatgtagaaggcagcgtaggcaacgcccatagggaaccagttctgaagtcggcgccatctacgtacaaaaactttgtcaccaaatacattttgatcgaggcacctctgacggtgtacttaccgataggcttgcgagtgtagcagacgtccttggggactaaacagcgcatcataaagcacaccgcacgccacaaatgcgaggatcaacagcgaaatgaccacttgagcgctcatggcttggagcaacaagcgtaattcgagactgggaggtcgagcagcatggaaacttttggccagaacgtgctgctgatctctttgtcccgtcacatcggaccctattttcagttttgttgttgatgtttctgtggtaacgcttcaaacgcatagattgatcaccggagcagaattcggaaccctgcacacgtccaatcaatggtttggactttcaacgtacaccgaaactcactggcattgaaaaacgtatctgtattcttagcgaggttgaagaattgtgatctcccagcgcgagtcaaaacgatgccgcttcatcttgctcaagtagcggagatttgcgtggtagcggcatcggcgagacgacaaagtcactgttaagtcggacgatggaggcgcggcgactgctaacactgccaagggacagcggcgtcatctcttcaaagtcccctggatgtggcgtccccgctgcctgctcctttgtcatcatcatgccctcttcagagaagtacgagcctaacaacgtgaaaaccccagcgaagaccgacgccaccatcagggagaacgcccacactccgtagcctccacgtccaacaacattgcccatgaaggcacccgacagccccgtggagaaataacccacagccgtcattacaccagcggcaccggcagcaatatcttgcgataaatccgacggtaccgtgtagctcagcagcgtgtagttgcccagtaagaagacgctcgagaagaataccaaacctcctagcatcatcacgctgcacgttgcgctcatgaggtaaatcaggccaagcacaacggcttgaagcagcgagaagatgaagatcggcatgatgcggtccgagtggaagatgacgtcgctcagccagccacacaaaatgccgccaacgaatccccccatagtccacgcgccgccgataattgccgtatcgctcgacgtgagtggagcctcacgcaccgcgtcgaagaaggagaagaaccagttgaggaatccgtcgcgtgcccagcagaggaaaaatacagcaccgagatacccgaggaaagtgtaattccgcatgagttgctgcatctgctgcttcggagtaagataaaactcattatcttcgccatccgaggaggatatccgctgggagttcatcgtagtgggtagtatctcctcagaaaagttgtgcgtatcggctggggagctcttcacgtagcacgaaatgacgagagccattacaaacaacgcggcaccagggattgcgaacacgtaagcccagccgaaggtcccgatgatactgctgccagtccccagtgacaagtagtagccacatgtgagcatgatattgaagactccagcgaagattcctcgctcactggtggaataccacgccgcgttgatcttgaccacagcactcgtgccgaagccttgcaccagcacattggcggcgtacagcacgacgaacagcacttgctccacgacaaacggcaccttgcagaggaaaaggacccccagcgagaggttgcacagagccgccccgagacaggcgacgatgatgccgttcttgcccccaatgcggtccgtcatctgacccgtaaagggcccagagacggcataggcccacgatccagccgagaggaccctgacggagcagcaataccagcgtcagtgcgcgcgactcaaccagtgccaatagccgacgagacgtaccagcccatgtacgcggaggagaagccgagcttgtcacgcacagctgagacgttgccggccgccacgttgtacctggccatgtagaacgcggcataggccacgcccatagggaaccagttctgcagtcgtcgccatcttatacgcaacacgccagaaatatcaatgaccctgcgtatactcctgatgattgtagggcgccctaccgatagccgcgcgagtgtagagcgcgtccctcgggactgagctccacgtcgtagagcgcgccgcagacgacgaacacgaggatcagcagcgacgtgagcgtctccacgtccatggcgcacaactcgctcggcgtaagttggcttgggcttgtgcaggcggggcagatcagggagtgagcgcccgatattgcgcgaccaggcaaggcgtgcagggcaccgacgtcagtgatggagatgcgcagtcgacccagccagtcgcgtcgagctgcgtcatgcctggtacctccgctacgacaaagggcggtagaatgctcccagtgtatgttagcgcattgctctttagcttgagctcgtccgctggttcgcaagcagagatggcgaagcgactgcaacttgcacaacgaaagactgcgtaacggttcaacgaggagaaaatcggaaccctgtgagacgtccaatcagcagcgtcgatgactcaccgtgagcttttcgacgttgagcttgaatcgcagcgtttagtgcaaacgaacgtgtgcaagctgcatcgagagaacaggccaagatgtagcatggctactgttgactttgcctacaaacatagtaaaagtctcgtgaaaaaaaaagtttttgattttttgctattgtataccgtccgtacggtgattacacctgttgggtgattagtccgaccgagtgcagctgaagtacatcctggttgcccagtgggcgactacaactacggtcatgacactcgttgattacacaacataaatccaaacctagtagtcaaaaagatggcgaggctgagcgcggtggcgtcgcgctatcaggcttcggcgacaccaccatgataaagtcgctgctgttgaacgatacggaggaggtcgagagctcatcggagacgtccgtcatcggcgtgatggctgccggctgatgtctggactcggctgtccggtccttggcgaagtgcgagccgagcttgacgaacacaccggacagaatcgacgcaacaatgagcgacaccgcccagacgatgtagcccgcaccatcgatgacattgcccatgacggcgctcgagaggccggttgagaagtacccgaccgcgtgcatgatgcccgtagccccagctgcaatgtcttgaggcagatccgtcggcaccgtgtagctcagcagcgtgtagttgcccagaatgaagacactcgagaggaacgtgagtgctcccagcatcgcaacgctgcacgtagcgctcacgaagtagataactccgagcacaacagcctgcaacatggagaagatgaaaatgggcttcactcggttcgagtggaagacggcgtcactgatccaaccgcagagaattcccccgacaaatcccccaatggtccaagctccgccgatgatcgcggtgtcgctggacgtgagaggttccgagcggacatcgtcgaagaaggacaggaaccagttgaggaatccgtcccttgcccagcacaggaagaacagcgcggcgaggtatccgaggaaggtaaagtttcggagtagctgctgcatctgttgcttgggagtgagcgcctcttcttcgagaccgtcaccacacgacatgcactgaggctcgagctgagctgagaacgttggcagatcatcggtcgagaagtggttggtgtccttaggggagctcttcacgaacgacaggatgatgaccgacatgacgaggagagcggcccccgggatgacgaacacgtacgcccagcccagtgactcgatgatgctgctacccgtgcccagcgacaggtagtacccacttgtgagcatgacgttgaacacgccggcgaagacgccgcgctcgttcgtcgtgtaccaggcagcgttgatcttgacgacggcgctggtgccgaagccctgcatcagcacgttggatgcgtagaacaccacgaagaggatctgcttcacgaggagcgacccgtggctgaggaatatcatccccaacgccaagttgcacagagcagccccgacacacgcgacgatcatgccgttcctgcccccgatgcgatcggtgatctgtcctgtgaaaggggcactgatagcatacgcccatgaaccagccgacaggaccctataacggatgagcagcttagttagcaagcagataacaagtaaaatatcgaaaccgtgaacgtaccagcccatgtagacggaggagaagccaaggtcgttgcgcactgacggcacgttaccggcagacacgttgtacctcgccatgtagaacgcggcgtaggcgatgcccatggggaaccagttctgtagtcgacgccacctacacaacaagaaaaggtgttagcgaactcgagtgaacacaacttgtaggtactgaccgtaccgatagcccctggagtgcagcttccgcccttgggggctcagctcgacgtcgtagatgacgccggcggtcacgaaggcgaggatcagcagcgaaatgactacctgggcatccatcctgaaaacgaggtggagttggtctgcccagcacggggaaactacaggaatgagagcctccaagcagctccaaaagtccgggcccctgcaatccgaagccttcgccgcccatgcgatgcagcaacgtgcgtgactctttgcgcgcgtgcgcgtcacatgcgcctctttctgagcccagagttcctcctccagccattgacacccgcaagttgctgtgtcgcctatttgaagtgcggtaacggccacagaaaattcggaacccagtccacggaccaatgggggcgcgtgttccaattcggaaccccatccggcgaccaatcaacggcgctcttaggtttcagcactcgacttcaacatcaaagacggttaccgctggcggtcagcgctgcatcttcactgaccacgccaccacgtccattcttgtacgccgcggcgcaggcatagctgcatttgaagcgagatctcgacgccacatgcttggagaaggctcaggagagctctataatacctgtgccttcgctgctaaccttcgcccgataggcgcttgctggtcaacaagcggtagcgtgatgcaaggctggcaaagggctgatgagtggtcaacaactcagccactaggggcagatcttctgtgcgacacgtgcgtcgcacgacatggcggcgctagtcttttgctttcggagagcgaggtgggttggtttgcctcgatccggcggaatgaccatgcatgccacagcgtattcaggaacttgcgctcgggccacgagcactcgcgtagcgtatttgctcgagtagttttatgctagaacagcactccatttggttcgacgtacaaaccaagctgaatggttattgatttctttcgtcccgggggatatcatatcgtgccatcgcgaggacaggcaatatttctccgccagatgagccttgaagctccacttcaaggcgctcgcgtccaacgacgattgcgtccaatggcaataaagcgcatacacgagctgtattggtcatgcatgcggagtgggtatcctcggaagcaaatgacgtgtaggcaccaagactttgcgtcatcggctcgaagacaagttgaagtactagtaagccgtagaagcttgtccgccaaataaaaaaaatacccattgtcgagattaaattgatagttcgtacagcttatcttggcccccaggcgaatttgtcatcgataggagcatcctcgcaaaggtgcacaacttttgggggtaagtgagccacttctagagcaaaacgagtaattcctagtaagcaagcacgtagacagcaaaataaacgatagaagcaacctctttctagcaaacagaaatagacagcaggcgaaaaaaggcaaggcaggataagcacatatttttgtcccctagcaaagtggaagcctgcagaactgcagcaataaaatatgtttcgtcgttcattgctttcattttttttcatgcatgaagggtttaagcggaggaaccagtgctgggctgtttgcgtaaatgactgtatgcaaatagacttcgacaaaataaaacaagcgtatcgtagtgctaagatactttctcttgctgcaaaaacaacggcaaaaacattgaaatgcggatcctgaaaccagctgagatgtcatcgacaacccctacgacagttatataacttttagacaacttgaggattggtatacaacatgtccttaattcaaatcaaagaatagatgctgacgcggcgttcagctcttcgctccctattgaagctattctttattttccctcagtggtagtacactttatagtacacaggtgcgctggttggattcaatacacatcatccgaggaatgacctcatatccacgtacgcaagcacaaggatttcgtgtgatacaatgctatgctgtcttcacaacaatcaatccttcagatcgaccagttgcaatggaagctggtatctcctcctatatgtcggatatgttgtggatggcaagagtaggagaggagcgtgggttttgttgggcggctacccagaatcgaagcagtcggctttgtacacgtgatttaaacacaagatggagatggcagcatcactcaatctctagagcgggcgatgaaccagttgacacaccgtgcactactatcgacagttcgactaacactccaaggcacctttccgaatactcgcggcagtacagccgcgccaatctcgagtgttggaatgctggtaaggaaactgctaacgaatggaccacgaaaagccgtaaaagccttggtgaaatcacgccaattggcaagacacacagacacagtactccagagagcagatattccgcaacacttaaccgccaggttagagaacgaaatgaagaccagtagtagcgaaaaggggttgcaggaccattattcgattcggaacaccctacagagattccaggactctatagtttctcgttaaacgtaaatagaggacctcctaaccacggttggatgcaatacaccatttagggcatctctatagtacgtgttcagtaaaaaggaatctggatctcatttatttatcgtgcttgcagtaaagatcaagttttgaagtccagtttgcacacaaggtcctacaccggtgtactcgctccaccatagtcatttgacctgtaaaccaggcctggggaaaatgtaatcaattggcctcacaaaattcgtcaaccaccactcctgcaacggtcggtcaagcattccagaagttgagctccaccgagaagacccaagaccactttttgtggcggaagttaaccaaccatgcgattgaccgagttttctttgctcctagtggccattttaatggcgtgctgcgccaccctcgccagctcgaccaatgcaatcacagcactgggatcccgccccaacattgcgcccgcgggtgcgggtggcagcgtgcagcgttccctgagacgaagcaattcaacggtccgcatcgaaggtgacacggacgaagagaggggtgtgtggacacgactgaagggcatggccaagaaactttccttcggtagcaagcgactccagaaaagctccagtgctctcaagacttccgaaaatgcgatcgtccagcaggcggaggcagtgctgatgcgttgaagactgcccagaagcagaagcctggtgagattgccagggcggaatcgctggcgaagaaaaatccagagttcgttaaggccgtcgagaaaagtccgtctttccagcgtatcgtttcgaacatcgcaagggaccctgctggtgtgcgcaaaaaaccgggtgttggcctcactatcggtatcatcgtgtttatcatatttgtcctcgggtgggcgggtttgcttaggtggagtatcaaggcaattattgcgagcagcccgtaggtcgattaccgcaacttgcatggtggaagctcctgtctaaccagagagtcgaacatactctttatactagtatcacattgccatggaaacacacaactcatctctattgtcattgaaatctaccgggtaagggggtaaggaggcaaaatcgttgtgatacttgagtaaattcatctacgacgagcttcccgcttttgatgctttgttgtttgcgtccgcttttgtcatttgatcaatggcacgcgcgatatcttgggacttgaaatccacgcgcatgcgcagtaaagtcgcaatagtctctagcgacagctcttcacgcacactagcaagatagtctagaacgtgcgatggctgcatcaggttcaaaatgaacacaatctggaagagccgcgtgaaggctgagcgtaaactcttttggggcacaagtgtcgacacacgagcgagcatgttcgtaacttcgcgctcgagctgcagcgcacccaagtcattgcaatgtttcttggtcgtaagaagcgcgcgttcgacacccgacgtcaggtcttgtgtaacagcctcgaccagatcctcgaagggggcactgcacagggcacgctcgtaccgcttcagctcccggttcttcaaaacttcttgctctaccagccgaagcaatggcgagccccgagagcccagtgcatcgtactcagctgaggtgagcacgtacttaagcctctcctccatctgacgctggatcacttccagtagccgcttacgcagcgatcgggacagcacttcttgaacctcgttcgatacaatggagtggaatgcatccgtcatgtcgccaattggagttggcaggcactcgaggatcggcgcatcattggggaaacctgcgcgggagtactcgtcgattttctcctgcagcgcgcgaacaaattcgccactcatgaaggccgagttgatcgtcataatcagcctcgcctcctcctgcaaagtccgctccaagtcatcgtcgactgcctgcagcagcatttctgagaaagacacctcgtcttcaccatctccgtcaccatcgagtcgtccggacccattgtccttgtcagacgttgcattggcgacactcaacggaataacgcacggccgactaggcaatgacaagattgcaggaagatactgcgactccaacgcgtccacaagcgcgatcacgatagatagagccgtatggtagttcatgctgcaccaaacacaacaacaatttcgttaataccatactataaaaggtaataagctccaacatcgaactcaccactgcgacgccctgaagaaggccttgttcagcacgaacgagacgtcttcaacaacacttgacacataaactccctgctccagctcctggggctccgcgattgccgtggccttgtgcacggactggaacacgtagaatctctccagcaccacgtacacgccgctgagctcctgcacctttacctggaagcctccttcgccactttccatctgctgtcccagcccagcacacaccgtagccaagaaggcagtgtagctcacgagcacgcggatgatgaaggccagctcgtccaggaacaggtcgatcatctgcagactctcgtccgcctccacgtcctcgccctccagcgcctgcctcgggtccctctgggcctgcgcgttggcacgccgttcccacgccaccatgcgcgcgtcgcccgcgtacatctcgaccatctgcaacgcgatctcggcgcacgacgcgtggatgggctccagcacctgctgcagcacctgcgcgtcccccgtgacgtccgccacggcgttcataatgtccgaggcgcccgtgagcagctcgctcagcgcctccacgtagaacgcgcggtcgatgtagccatgttcgttcaccttggcggcctgcttgctgccgcgcacgcgctcgaggctggcgcgcgcctgcgtggcgaagatgcgactcaggcagccgccgaagcgcggcgcggcggcgcgcgcggcccccagagcggcgcagcgcggcgaaggccgagagcgccgcgtccaacgtccacgtcggcgcccgcgcacgcgtgctggaggcgctcgagcgccggctcctgcagactctgcgccttggcctcgcagctgcgcagcatctcgtcgcgcacggccgccgtctgcgcgtccccgttggccgccgacgccgacacgcgcatgtccccgagcgcctggcacacctgctccagctgctgctccgcgagcgccacgtagaagcacgtgacgctctcctcgaagctcatggccgtcgtccggcggcggaagtctgagtgagactttctcacgttttgttaagggaataatattaaaatgcccctcaaagtttgggtgtttactaaaatgtcacgatggatacacatcttactactgtaaaatgccacagaaactatgtaccgatattacatgtatatgcatgacaacgctcctggaaacgagcgcaagaacaaggtgaacggtgaacaatggaaagcaacgcagcctcaaacaggaataaggttgtggattgaatggtatgtaaaactatacgcatttcagtcagctcgtccagacctatgcgcaatatcgacctgagcaagtttgggggaaaccgatgtttgtcgtggccaggaatctcccgcataacgagcaagagaattaacttgaccgcgcacgatcaatcgcatcgtggccgaccaactccggcttgacgcggcgacttctgcggaagcagggacagccatcttgcttgtccaactccgtgccacgcaaaatcagtcaaggaggcacgatccacgagcttcgacttgttccggctccgaaatccaagtggctggatacgaaacctcccctgtaatcgccgatctgaccccacggatgaagagcggatgcttcgtcgtgccagcaaaaacgactatgacgtcgatgaagagaggggattgttcttaacgagcattctgtctaactcagtcccctccaagcctgaaaaaggctagaaggacggcgaaaattaagaattcggtgaagaatgcgggcgactaccacgattgcttaattgagaacaagcagaaaagcttggcatgtccacgtgaacatcaacaacaagcggggtgtagccgctgatccactggtatgtccgcacaagttgacccgacttggagtcgaggacgcattcagctacaatgcacactatggacaatactctcctcttgtttgaagttgatcaaccgtcctactcttttcttttaaacaaattggggacccgggtggtggacccggggggtttcgcagttcgaagctatttgtatggatactcgtacagggaaacgatgtactcgggtatctcctgcgtctgcttcgcagccgcagcatctgcttaaactgccattgtacaaccaattgcaccaagtctgatcgctccttttcaaaggcattgccagttcatatatcgtcactccgatgaagtgaacatcgccgcagagtttgttgaatcgatacttcaacgcttggggtttgccaagcccaccgcggtgattctacctcctcctgctcgtcggattaggcttccacggatttagttttaacttaggctcgtttgtagttagcagaacggtttttgacaactagctaatcaacgtacttgaagtaatttccttccctcctgccactgaaatgtgccctgacccaggtcctttctttattagattgcagtgttgtgctcggaaacttaccggtggcgacaaaacaagaaaaatccgtgcattcgaatatttagtgctagcaggctaactgttcaactgaacttgcagggtaacctgatgaatccactaattgtttcaagtttgataagccaaaactgaggtctagcagatcttgatcgcgtgtaggagtaggatacacctggtgtttattcatcgcttagacgctgtacgcccaggcttcctctctcacaagaatccgggacgtacagcgacaacgcgggagcgatgaaactctgtttgacaaaataggtcgcagccgcacacatacatacatgtatttcgtccgggtcgcctgaatatctaacaacaaaagcgtgtcagcttcgatttgtccatgaacgtaacgtattcatgtagcattaggataatctgaactaatatgggtaacaatgtccttcgaagttgttttgacaagaacaggatcaagtagtagataattctacaccaccagcaagcataatactatccaaagtcttcatagatataatacctgagtgagtgcagctagcttcttaatgcccccacacgagccattcatagctagataaattggaactaggctttttccggtttcatatacggttgtcattttttttgcactaccttatagccctttcgccggagaagacataccatcaggcgcagctcttttgattctccgctaaacaagttcgctcgcggccgtatagaacccgcgttgccggtggatagagtttgctggattaaaaaatattgaacgaaaaaaatcaagctatacctctcccatcttgggtcgcacaaccttaaaaacttgaagtagtttgtggcaaagttttagcggaatgtttaacctaatccatcaaggctcattccaatgagtgtgaatattcccacaatactagcctgccgacaatttagacaaattcaatgaccacacaattttcaataatctctccgagaaactgtgcatacagaaaaacactgtctgaaagaggagggtattatgagttatgactcatgactgaatggacagatcgaatctatagctttaacgcaactatgtcgagtgctctggagctgcatatagtataatacgatgtggtaatggcaccagttgtgttcaaggtactaacaccgatgtctcttattgtcagatgcaccattatgtactacgatgaacaaagtacatctacggtagaaggagaagaagctccgaggcgaataggcatctatcaaaaccttcagaccggatctgatcgagtgctgtgtgatgtagtgtgaatgttgtttgatgacatccgctggggggagaagcaacggatgtagcgcgaatgtcgttcgatgacatccaaaaaccttccccaattcgaactgcgaattacttttaagtttttaaactttaaatttctgaaatttcttttaaaaaagaaatttgcgtctatttgcaattctggtgatagatggggtgccagtacgtatcattcggaatgttacccgcactcgcttcatcgccactgcatcagacaaagggtgcttatctctcgaggcggcgatacaagacacccggcgaactttgcacctttatcagctggactgcaacgcgatgagaccggcggacagccaaatttatgagacgcccaggggtgacagcgtaaaagaaggcgtcgatgctgccactgaaagtggccacttggcctggttcaatagctgcacgataattattcggaaagctgcatggatgctgcagccacttggcgatggccaagcgattgcatggacagagaacagaggggagatgaaatccgggggaggagttgcactattgacgccgttgatggtgcagcagagagtgttacaattaaagctgagatttcaaagcgcccagtcctcttttgagcaacgtttaccgttctccaacagccactgaacaacaagaaagtacccgtttcttgctgcttcgtcaatcgcagtcacagtgcagccctcctctcggttaacacatagcactttactatttacaagtgcccaaacctcgcgacttggttcactgcctccgacgtgcatccctcgctctgttcacttgaatccacttaacgacgccaaactcatccatggcatacatagtgcaggccttgcccttcttcgcaagctattgcatatttccgatggtcttcagcagcggtagaatcgacggcgtgggtggaacacaattcttgacaagccacttaagagatctagatggcatagatgctccaagtgtaccgcgagcgaccgctacgaaacgtgtatcgagtgaacaccttgactactctcactactcgtagactcatgtatcaagaaacgataggacttcacgatgaggacttactacacatcgggggtgtatcccaaagagacgatgccgctttgctatggtcgtcatgcaaaatatcaggaggctattaactaaggttcaatagactatcttctcaatcaattgctatggtcgtcgtggctgttgtttattcatgtgattttttatcaatgcaagttgccgtcaacttgaagtgttgggtccggctcatcacaatccgttgatctgagacgtacgtaagcttacttgtccgcgacgaggggtccgatgagcgcgctggtggcctcgaagacctcgtcggggccgggggtggcgtccaccttgaagaccttgtcctgcttctcgtagtacatgatgacgggcatggtggagtcgaggtacgtgcggaagcgcttgcggatggcctcggcgttgtcgtccgtgcggccgctggtcttgccgcgctcgagcaggcgctcctccatgacgctctcggggcagtcgtagaagagcacgccctgcacctggaactcggcctcgggcatctcctcctgccagccctgcaggttgtcgaagttgcgcgggaacccgtcgatgaggaacaggtcgcggccgctcttgaccatggcctgctgcagcaggttcagcgtgatcttgacgggcacgatctggccctccttgatcatgcggtcgattagctcgccgttctccgagcccgactggcgctcctcgcgtagcaggtcgccggcctgcgcagcacacacacaaaatatcaccaacatgtcagcaatgacagttatgatacattgcatcttttggcctaaatctccctaaccgacaggtggacgaagccgaacttctccaccagcttggcgcactgcgtgcccttgccggcgccagggccgcccagcacgaacaggatcttcttggtcagcgcggcgcacatctcggcggcaggttcaggtaagttggtgcttcgtcgtcaaatttgcaactgcccaaaacgtacgaggggacaaaaagcgacgttcacacaaaagctctaattcgtgtggttcacactaatttaggatgagtacccttctaaggtggaccagaatagtgtgactgggactattttgggaggcggttcgatcttgattgagatccgctccagagtgcgaggaaggatcgcttcaagtgccacaataacaggcgccgcgatggagaacaagggccacgtggccatcaacatgtcgggcagcggctcgctggacgtggcgctggccagggaggaggcgctgcaccgcttccgggacatcaactgggccacctacacgcggtacctgctttttatcaggttttcttatttgttgcacatattggtcattaacgtcgcattattatcttattttggtgtggactatttagtgccggagggttctccctggagaagacggagatcaatgcgctcaaggacctggaaggcgtcatcaagccgggagcagacgacgccacgaatgtcaaggcagtggacgagttcatgagcggtgagtgagacaggtctaccctattggatccaatgctgtgtacttaaacaattgcatatgggctgcagatgctgggccgctggtgggcagcgcgctgctcaagctcgtgaagaatgtgacggagccgacggtgctcaagtactgcctggcccgcatggaggagctgctgccgggtacgggcggagctgagaggtttttagggtttgttgacactatggcattgactttgtgtattattttatatggctttcgtacagacggtcttcgtctgcacaagcggatggtgtacttcgtgccggaggggggcaacgtggatgcggctccgttcttgaggatgatccgtaacgacacgggctacatgcaatacgccgccagccacttgctcgctctttttctcacgtgagtgggttgtgcaattgattattattgtgatgaggttggggtgatcctaacgtttttggttggttggaactaggattcgaccgcgccaggaagacgcggaagcgctgggccagtgggttattcaggcgctgaagactggagccttgccgacgtcgacgaacgactcaacccgcgcaaacgttacgcgtgccgcggtctcgtctttgatggtgctcctgcgcaatgagaaactgcgcgtggtgttcgttaagcaaggcggtgtggctccgtaagttgctgtttgagtattgcagcgcgttgagggcgtacctcctcacccgattatttttttctgctgagatagagtggtggagttgctggagagctcacagaaccgcgctcagctggcgtatgaggtatgttcatcaagttcttccgtcgttatcgcggagtgctaatgcttgtatctgattcgttgcagctcacgttcatcttgtggactttggcgttttgcaacgaagctatggagaagtttgtggccgccaaggcactagatgcaattgtgctccaagtggcagcagctcctcgcgagaaggtcgtgcgcgttgccttggaagctcttcaggtaagctcgttccttcaaaaactgagggtgcacctaataaatcgtgtcgtcttgctaatcacgaagtgtcttcttcttatagaacttacttggcaaactgagtggcttcttcaacgagcgtatgattgacagcggcttgctgaagacgctaaacaacatgcgcgagagaaagtgggctgatgaagatatcgcgaagggcattcaggccgtccgtgatgtgctcattcgtgagtacaaagaactgaagtacgtactacaacataaacattctaccagctcttggtgtatgaagcgctgatcacttgattctgtcttgttgcctcggcaaacagtacgatggagcgctacgagaaggaactacgaacgggaaccctgaactggggtctgctacacacggacaagttttggaaggacaacttcatgacgttcgagaacaaggactttgagctcattcggtaagtagactcgatctcactttattcaccttgttggccaatactcattcatgtcgtactcattcttgccgtgtgctgcagtttgttgatcgacctgttggagtccgacgactcaaagacggttgctgtggctctgttcgatctgggagagtttgtgcgcttctacccgaacggcaagcacatcgccaagacgcttggagcgaagaaggtggcaatgaagctcatgactcacgagaacgcagaggtgcaaaagcaagctctacagtgcatctcgaagatgatggtcaacaagtgggagtttgtcaagtaagaaaacgacagttcggttcgtgttgggggcacagacagagatccacgcgtctccgaggcgcagtgcgttcgtaggaggcgcataaaaacagttttaacattgacagggagttgtggttgtagcaacagttgttggagtgtttgtcgccaccttgataacgaagcccatgactgcgtgtgaatacatcgcgttatacgtcgcgtttcgcatcgcgcgtatctgctcgaatttcggtcttgcctttcatccagacttagatggacgaatgattgacaattacactggcaagttttgctgttgttatttgtgttcatcgtagtggggcgcacacttccgatggatcaaaacgctgaagtgggcttggctacttcgtgtttgcccacgtgcgccaaagaccaacagcagcctccgccgcgcaaaagaagctcacgaggggttctacgagcaacagtcaatcaagtgttaatacaagactacaatctgcagttaaggcaccatggaatgatgaacgcaccagggaggaaacccttctcaagtgaccagtggatgcacggtccagcgtagaagaagtttcggagctgcacgtagtacaactcccgacgactacaaaacgaccaacagaagctcagtcataccagtcctgaagtaaacaagaacacacaatgagctcttaccgagcctggatagcggcgagctgggtcgcgcgctacaaccaatgcaagcgacacaagcacacacaagctcagcttcctccacccaagttccacaacaagcaccattccatcgtcccagctaccgtacctcttcgtcagagaggtcttcctgctccgtgatctccttctcctttgcagtcaacgcgcggatcctgtcgacacagatacaccagtcagaagcccgaacaacgccctcaaaccctatcagcaacttcaacgtaccggagcgcgttggcgtacacgtccagcaggatgtagatcccccacgcctgacacgactggcgcgagaccttcatcgcgtcaatgtttagcagcttcggggcgctgccatcatccaccggcaccaccagaaagaacacacacagtcacaccgtcaacaactaggataccctagactcccgcacacaactgcaactccagcgactcacacgaagccgacgtaggagacgtgctccagcgggtagtacgcgatcatggacagcgcctgcagactgacgacgcgccgcacgtggtcgctgtcgtccccgtagcaccacgagccgttcttccaggcctcgtacgactcgaagccgcccgtgaagcggatgacgtagcgcgccatggagatgttggacgcgatggcgcgcaggcccttggacgtctccgtctcctgctgcgacgtgtgcgccagcaggtggcccatggcgcccaggccgtagccgatggtcttgtagaacttgtcggcgcggaacgtcgagctgctgaagcgcgcgaacttgtccacgtccagcagtgccaggctgctgctgctcttgccttcggcgctcatagctgctgatacgggctgtagctgtgggcggaggaatcggcaaatgcgcaagacgagggtattgcgtcctcaggtgcgacgcctgcttcaaggcagagaggactcctctgacgtttgacgtatcatttcgcccgccgagaattggtccacgcggactataatttggtccatttagggtcttttagtgatggtacatggtaccggttacatattcagttaggtgcgatattgaaccgtacttaatcactaagtgcgttagcgctcgctcttaagtccggtctggctccctgacgcacagtctgacttctacgaaagcggttggaccaatcagctgcaggctctgacggacgagccaagttatagaccctgcgaccgtgctagcggcgcaggatgcgtggcgtcgtacgcactgggggattgtatgtaagccggcagatggcggctatctcgcgcgatggaccgcggctggcagtccgccagcagcaaccaaggcaacatcgccagcgccgacccaagaagcgctcggcagctccgttacaaagcgcgatttgcgtcccttcaccgcgataacagccagctgaaggacaggcctctagctgctgctgcgtggcgcacttgcatttctccacttcttcggcggcaacggctgcgggacattgaaacacacaagagcgagccattactgcggctgtggccagttggcgcgaggcgcgacacactactcactctcacacctaaacgagagcgcagaggctcagaagctctactccctccatcgctgcaagtccggcacctcaccgcaacacaagccattgcagcatgtaccgcgagggatacctcatcaagtgcgggcgcagcacgtatgacccaccggtaagtttgagctgaagtttgacattgaagcagttgttgaacatgctcgctaacggttgttgttgtgtgcagcaactgctcttctgcgtgttcgaggacggcgtggtcaagtacttccaggagaagggcggcatgttcgtgggcgagctcgagctggcgggccacgtgaccaaggtgcgcgtggagaagtccgcgcccggcaagttcccgtaccgcttctccgtgtcctcggcggaggtggtgcgcgtcgagggccgacgcatgaagctcggcgaggcgcgcatgaccgagttcgcggcgccgaccaacgacctgatgaaggagtgggccaactcgctgcacctgtggcgccgcatgaactggaaggagaacgtcaagttcttcgacaactcgagcgaactctcgcaggccgaagagctggagacgctgcagctgcagatgcacacgatgaagacggtgcgcggccgctcgacctccggcgccaagttcaggacgccgttcgtcaacatcatgcacggacagccctcgcccacgatcaagaagctgcgtcagatgatcatgcacacggggtccacggcgtgcgcgtaagcggcgcgtgcggagtgaccatttatcaattctgcgctgcgggggatctgtcgctgccgctgcgttgtttattatcatgtctagagccatgcaccgcgtccgaagtcccatcagccggactgcaattttgtgtgtataaatacaagccactattatcaagttagcgcgtcttggagctgcattgcatcgcgttggtgttgcggccgtcttgcgataactacatctgtagcctttcgcattattgcgatcgtccagcactgctggactagcagtgtatctctgaagccacttaggtagtcgaatgaccccatcgaaattaatccgcgaaaactggcctgaaagcgcagttagcgaactggacaccacctcatcggtccacaacaatgacttgaggagagcaaaacttattttacatttggcaattgataaatactattctatatgagcgggcgagtggctgcgtcttcatcccccatgcagtcaactctagctttttgctgctttcaagcagtttcgatcttgctggcagcgcgagccgcctccaggtgggtcgacacagcgtcacggatcagcaccgagtcaacgcagtcggcgcctcgcagccacgggtgctctagcgcctccgccactgtgatccgctggtccgggttgaccagcatggctgagatgaggtcctgtgcaccaggagtcatgacctgcagcacctcgtccggctgcgtctgccaaaagtgctccaagtcgccggccagcaggtcgtcgtaccaggcgtctcccttgtgggcctcgttgaacggcggcagacccgtcatcaagatgaacagcacgacgccagcagaccacacgtccaccggcgtgccgcggtacagctgtctcgacctgatctcgggcgccatgtagagcgccgtcccgctctcgtctcttgaaaacacgtcggaggcgtcctcgcccgtgggtgccatcgctgcaacgccaaagtccgccagcttgagctggtagttggcatccagcagcaagttctcgggcttgacgtctcggtgcacgacgccgttggcatggcacgcctccagcgcgcgcagcagttggcacatgtagaccttgaccaacggctccggcagcgcgccgccgacctcgagcaggtcgaacaggtcgccgttgggcgcgaactcggtcaccatggccacgtagtcgcagtcgagcttcttgccggacacgaggcggtcgatctgcagcacgttcgggtgctgcacgcggttcatggcgttgcactcgtgcacgatggaggccacctgcagctcgagcgcgtcgaggtccacgcggtccgtcgtgagcgcggccggcagcttgacggccacgtcgcgctgcagccggtcgtcgtaggccagcagcacgcgcccgtgcagccccgagccgagctccttggtgatcgtgtacgggcccttgcggagctgctcgtccgccggcgtctgcagccgcctcggcgccaggggcgacggggtgctgctcgttatgcacgccagcatgctggtgttgatgtgggttgatgcggactcttggaagtcgttagggaaatggggaacgctgttgcgcgccgaggtgtatgtttctgccagccatgttgatgtatcatcagggccaaaggtatctcaagggaccatgcacgaggttcgaaacgcgacttgggctcagtatggtttttggacgggtgcacttccacgcgctcttatctcaacaaaaaatgtcgcttctgaatcttgaatgcagggcttttcttcataaacatccacttctggattattcaattctcgaatacttttgattgtacagggtgcataacctaggttttgtatagcgttcccgatatgagaatctagtcttcaaggctatgtgatgtaagaagagaaagaatggagcggtaactgtacgccctatgaaaaatgccttgcgcggctgctaaatcaaattgattctggcgatctgacttggctacgctcctcttgcgcttgcttgcactgtgtgtggccgcttggaacgggaaatgtttcaagcaatcctgctgatcgctgtcgccgccgctgtgcatttcactgtgcgtggtgtgagcaggtattttagtcgccgcctccttcgcgtggctatgccattgctcttgggcttcgggccattattcattcacgggtaaagaggtattgatagctttgagttcgtcagcccccaatctgccgcgcgacgacgagtgcatgggggtgcagctacagttgcggcccataatgcatgcagagggcgttatcggcttacgccagcttacccaccaaccaaaccacggatcaaataatatatgcaagtgcgctttgagactgcaactaaagcaaactccaggagacatacagataggagatccttgctgcagctttgggtagctccgcgcttctcaggtacgacatcctgcaccaacggcaccatcattcggccacaagttgaagtcctctttttcgccaatcgcaaccgccgagtcatcacttgaagcgccgccaaacggcccgagccaaagcgaagcgggcaagatgctgcggctcgcgctgcgccgcccgcttgtggggctgcgcggggctggcagcccgcatcgatctgcgctactgcgtccttcggtctgcatcgcctccacctcctcctcatcctcttccacctcctccccagcccccatcgcgtcacaggacaacggattcgcccgtggccgcacaatctaccgcgtcgagggcgacggctcgcagcgattccacgtggagaagaccaggggagcgctggggctatggacccacaaggccgaaggactccgcagtgcccccacgagtctcgccgcggcgcgacgcacgggctcgtggctctacgacgtgttgtgggacctgttcctgcccaaggacgcgcgcgcgtcgctcaccaaggactacttcccgtacgccaagtggagcttcgtgggctccgtggcctcctgcgcagccagcgtgctgtccatgcagtcgctgctgtacgccattggactcggagctggagccatccccacagctgcagcggtgaattgggtgctcaaggacggactgggccagttcggaggcgtactcttcgctagtatcgtcaacaaccggtacgacgcagacccgaagcgttggcgcgtggcgtcgtccgtggcgctggatgtgtcggtgctcggggagatcttgacgccgttggcgcccggcagcttccttgccattgcatcgctggccaatgtggccaagaacgtggcgtggcttagtgccagcgctacgcgcgcggggttccacaactcgttcgcgattcgggagaacctggcggatgtgacggccaaggcggggtctcaagccattgcgtcctcgatctttggcaccgggctgggcatcttgatctcgcagttcacaggctcgtcgacgctgaacgtggcggcggcgtttgctgtgctctcgacggtgcacctgatcagcacgtacaagtccgtggactgcgtgcagctgcgcacgctcaactgccagagactgcatatcgtggccacgcacttcttgcgagccggtcctgagacgagagagatccctggcttgaaggctgtgagcgagcgagaggtgttcatccccacgatgctcagcgggtaccagacgctgcacgggaagtcggtcattcacgaggacgcgacgttggaccagctctctcagggcagtcctaagactctcggaaggctgaaggacttttacgcgggggagaagtacctgttgaatctgaagctaaaggagcgtgggccgcatcgcatcgatctggctctggaggagcatgcaacgagccaggacgcgcttcgagctcatttgcacgctgttctcctccagttggctctcgaagatgcttctgctccaccgacgagcgcatgggacctcgtgggggagaagtacaacgaggctctagcattaaacgacgagttcatctccaagctggagtcctccatgtggcacacagacaaccttctcgtcgaagagcggaactcgcgctacaagtggttagcttgagaagcacaaaacgggtggatgaatagacacaatattcaacggcgtcatctcaacaaacccaacatgtcaaaacggccttcctttccagataacagtcttgtgtacgatgcaagtcaagcagccgccccgttgtccctatctcgcgccatctagctgtcctcgaggttgatgctctggccgaagcggccgtacagcaccttcttcagagcctgaacatcatcatcaacacccactcgccatcagccaccccacatcttaaccactctcaccataacaaccaagcacccaccgcctgccgcgcctcgagcttggactcctccgcctgtagcttcttgagctccgcgttggcttcctaaacacccaggaaagtcacccatcagcaacattaaacccactgcaaccttgacacccaatagcacagcagccacccacctccacgcgcttctcgaggtactcctgggcaaagtcctccgaggcctccacgaagctctccccaataaatagcctgcaacaatccatactccgtcaataagggtgcagttgactgcaatgattaatgttgagcacgcactggacgttgtcgccctcgcccatcatgaggtccgtgttggcgtcgtccagagtgtcgagcttgtccttgagcgccttcttctgctcgcggatctcgtgcagcgacgcgttgttgcggccgaactcgttgatgcgcagctggtcttccttgcggacctgggggacaagcgcgtcagctacatggtcgtgcttctaccgcctcaaaaggaggcctgcagcccgagatatgcacgcacatccgcctcgacttcctgttgctgagccagcattgtcactatcggagctcctcgacttccgtaatgggagcccagtcaatcagacgtctctttataggagcagtgcatctttctgtattagaacatggatacatgtagctatgtatcgaagatatggctacagttgatgttgctgtgcacattgaagtgtgagtcttcgggcatcgcgtgtgaaggctccgtggttgttgcggtaggcggcaatgcactcgagtgtgatgactcgagggtgccgagcagctttggattttgcgctggcgatgatggaggcgatggcggtgggagtgtcgactccaccgccgtgcaacatctgagctgtgtcagcttcgaactcggccatgagctcttcgtctggcgtggcgagcagctcctcaacagcttcaagaagcctccgcatgcgccattccggatcccactggcgcagcaaaccgtatagtgacatggagccgttcaacagctttcgagtcgaatgtttgacgcgtttagttcgttgttcaatgcaagtgccgaagagatggcgctgcgtaccggaacaaagttgggatgatagatgtgggtgaggcagctcagtacgggtgcttcgaagggatattcgtgactaaacctgcaacgaacgatccggatgaatgacatattttggcggggcaaccaagctacgagtcaaaactgtagctgtatcgtaccgaacgtggaaattgaggactcctccttcatatggagatcctacaggtccattcataagcaccttccagtcccatgcattctctgcgagtggggcaaccatagtaacacgttacagctagaggaatgcgccgtaataacagtagatccttgtcacaaaccttttacaatgaagacctgcgagttagctgtgggatgggtgctcaggtcgagcaattcgcgacggatcgccattacatgcttggagtactgcaggaacatggcgagcttgtccccgtttcctcgtcgaatatcgctgacaagctacgattgcagtgaccgcagaggtttgttaagtctttcgaacaccccttcataagtcaagtccttcatcctcacatacccggacaaactcgtggtattccagctcgcccgaccggttttcatcgactttgtcgatgagttcttggacctgtgtgaaacgtaaagtgtgttgatacttgggtctaagtatgctgacctgattagtgcgtacttcttcgagcgtcgccgagatccccatcgactccatcaaaacggtaagctccgacgcagcaatgctaccgtctccgcttgtatcaaagtctgagaactacatgtagagtttacgctgtcaagttatggctactgtattttgtctctcacacgatccagcgcctgcgttccacctgctgcttcatctgctcgagttcttcccgtgagaattcatgcttgaggctctctgggagtgtcgctatccaagtttcgggtccgccgacgcgaactttcaccttcatcgctgccagtacagtgaagagtagaacaagctacgggtatttttggctatcattggctcagttggcattgaggagttaggagttagttatgggttgggcttactactttagagtaccgtcgagagtgtcacaatagcgtcgtcacgctatgcgtatggtagcacttgagcagagggtagtagtagctgaagcactcgggcaagatgccgtcgacgttgcagtcagcactagttgttcttgaacaggtaaattgagatctgattgaattagacgtgtttccgtaactagttttcttctagctagcctacacaactcactcagtaaactcttcgtacaaacatgcaatgttaacatgcaggatggcatcctcaacttgcacttgaacgtcaactcacaaagttgaaagtagatcacagctgacgaactctacccgctactaattgccgtgttcaacttgatagccttcgcgttcgagctaggatgagtaggatctgctagcagtccttgatgataccatgacagagagcgcatggatttgcacattgcgacgtacatgaatgcatcgacagacaacaaaatcccctgttagcttacacatcggcgcatgtgtactcggttctccttctgtttcttctagagtggcaattcgtatctttccaaagccaaaaatacgacgtgaagtgcactcgaaagcacacgttattattcggtcgaatgcatagctagatatcgtaggagatggatacttaaagtatgcttgtttgaactcgaggagaccacgcaacgcttacattcactttttgtgtgcttgagatggacaaaacctcggggatttcactaaaccccagctataggctcgctttctacttaaacggccaggccttgccgagtttcccaaggaagttcccgctgttcatcggcacgtttgcacttccaaagtttgtattgtccagtgcctgtcgggctgcatcggtcatctgggtccacatgatcaagtcttggtagtcgccgcccttggtcgtgctttccagtgcgtggttgatcggccacttactctcgtagttgaccttgacgctggggccatcgaccttgtcggcatcagggggaacctgggctgaatacccgctatgggccgatggagtgacagccaagatcttgggctccggcatatcggggttgtcgatccacacaatgacgtgctcccagtcgtggcggtggccgaggccagaggacggcgagtctttcgggaagtaccacgagtacatgatggcccagacgccattgtaccaggtagatcggccgtacacttgagagccccagccagaacctttgcacttggagctcggcgcgcccgttttcttgagaccgccgctggtctctccgagctcgttcacagcaggatacgcgtgacagccgttggagatgtggagctgcggtttgaacttgaccgcggctcgttcagagatcgtcacgggctcgggctgcttgaacggcacgacctcgtcatgtccaattgttttcggcacccatggagcaggtggcagtgtcggcgctggtgttgccggaggctgtgttggtgctggtgtttctggcaacggcgttggcgctgctgtttctggtaccggtgcaggcgtgggggttggcgtctcgaggagtaatgtaggggtcggcgtcggagtgggggtctcaagtacgggtgtgggagttggagtttcgggggctagtgtgggggtcggcgttggagtctcaacagctaatgtcggcgttggagttggggcctcaagtacgggggtgggagtgggagtctcgagggttgatgcaggggtgactgtgggctgtaaatcttgctgctgctgctcttgctgcttttgggtttggtcttgcgagtttgatgtctctagatccaccgagtttgaggcttctagttgcacctccagagcctgaatcgcggtgacgcagacaacagcggcgctaaggaatgcggttatcttcatgacgacgaagagtgagttgtggcccgacgaaggaaatagagaagtggtgcggcgatcgtttgaggaagaagtggactctgagaccggaagcagcattgggatagtgaagattagtcacgcattcccggcatccggtagttgtacagtgagtgcattccccggttgttttgaggacctactcctcccgcgcaagttatcgtgacactaggtcttagtaaacctgtactgtactactaagccccgtcacacctggatagccggaacttgcacaagatgggacgcgttagactgaggtaagtttttacatacattggggcgtgtgacctcaatattttttcgatttcgacatattgtatattatcggatagctcatgttaaaagcaatcgaataagagtgtttttacgcgttttacgagtggttttcactttcaaatttttgatgtccggttatgcccgaaatttgattggtcaactttaaacccgattatcttgataactccaaatggtggcttagcgtctttttgtttgacgcggtctctgtattacacggtagattcatggacagttcgatcgtgctttgctcaattactcactgtcgcacctgattagtggttccacgtagtcagctacagtacatgtaacacctcgacgttgttttcgagttctactataccgagttgtggagtcgaatgactatggatctgctaatgcttaactcttctggactcctagtccctagaagtattcttctagcagaagagtgagcaggtattgcctgtgtcggaactcgactacgaagtcacctccagttgtcctttcgtcactagaaatgccctcaggatgtgctgcagtcgagatgcgtcctacgtaccgtcgaagcatcgagagccaaggacgcagaggcccaccgagctgcgtgcttcaatggaacaatgcgatcgtaaacatttcttgtacttcgaagtaatgcttcccgtagaatattaatggggtcatatactgattggtgtgtgtggaccacgtttggagtgtgtttatattacttttctcggtctgcagcttgaagagggctacgagtacagcccgctgcatgggcaccaccaaagcactcattgctcttacgttgtgtcagtagcgacaacttgtagcctgcaacttgtggtctgaaaaagcgcgcgaaagctccagaacctacgagtgtacattaccgattccctaagcgaaaggcgcactaacgttcacaatacaatacaatatacacaattgtagtgttgtagaacgatcaaacactgtcgagagaggcctcagagagaccgtttgcaaccgtagcgaagcgtaggtctgcaatggtcggcgcgtgggccggagtaggtatgcctaagtaggagttactatctttttaccgacgccttgcccgccatgagcgaagcgaaattggcggtgcaaacgaggagctcacccaggcgaagcccgaccaaatccaccgacccgatcagtatacgagcccatataaagtctatcatgcttacgaggttaattgacttgttgttgaaattgcggctcaatctaactggaatacaatactatacggtagtacgatgccgcaatgaatgcggttagacggctaaatatatgttgttatgagtaagcttagttgctatcattttgaaaatacattgcctgcgaataggtgggtgaatatttatgccaccacatttcgattttaaatagtaagaaaagaaaacttacttttacagaacagcaaggttcgtattccccaacgaccatgaacattttacgaagcgatgccggcatatccatagtctggtgccaatatcatggttgacaagaagaaaaaacatagacactgacgagcactagatggtataagctgcatggaatgattcttttttttggtgaggctactattattaataaataccgtttatgtcaaagtaagtatattattgcaaagggttagtgatcatacttgacctggtggcgtatatttaggcacttatttcggagcctgctggaagctggcactttgacgtctaagtgagttaccctaaactattcctagttgatcggtttcccttcctgaggtcgtggtgaggcggcggtttgaggggatgcggttgcagaggttaatcgggagttccataaggggggtgacttagggggttccaggggatagtgatggaggtagtcgggggtcggaaaatagacttacgtggcgtttgtatcggaatcgctccgggcgagactcgaaccctcgtgggccttacccacagggacacaggagccccaagtgatcataacaacagtctttagctgcaaccgaagaaacccggttggcgttaaaaaccgttcttatgtatgtatgctgctgtggaattggattcagtcgatgtacaactcgcgcgtatggctcgtgcttggactcccggactattaaaacggtgataccatggatgcaaacctccaaagcggcaaaccagggttcgtgtagtctggcaactgcggcggtggagtctgggcagacgctggaaccaacaccagagtacctcaacttggcattccccagaatgccgcagcttctgcaagaaggcctcgtggaatggtctaatagaaggggagacgcgcaggttctgctggcagaccccgaagaacagcaaacgaagacgtaagtagtgagaatcggccaagggtaaaaccacggcagtagggttgttaggactcggaagttacccagttgttcaatatacctcatcatcatcatctattaaaacggtgataccgagtaccgctacgcatcgacaatacagtaggtaaagaattcttttcccgccaatcgatttaaccattagcgtacgcgacccagacaacgcgaactcgctgttgcgctcgagttgagcctgaaagcagcattttggaaactgttagctaactctttgggaaatactttgacaaacaatgataatcgattccaaaacctcactggaaaatgacaggcatatttgagccttttatattttgaagcatttaaccaaccatggaagttaattcgtcgtcgctgtagctatcgcccgagtgctccggcgataaccgcagtaaaaaaagctatcgctgtcgtcggcatacacttcctcgacgaatttggtgtactccagcgcctcgtgtgcaaattgacgcagacccaggtacatgttcgcacccacggggcgaatactactttgcggggatcaccctcacttgtcaatgccggcgccgtcaagttgtcctcgtgggagctctttctcttcgcgtagtgccgagcatctgacaagcgtttggtgctcgcggggtgctagctctccgaccagcgattgatgtgcacgcggtgccaactctccgacaggcgcttggtccccacggggcggttgtttgccgcaaagcgcttggagccacacatgaggcggagcatggactgcgggacgcacagcccaatgacgcagatcatgggcggacccagcggtaagtacccgcaccaccattgcgcgcgtggattcagcgtcggcaagatcttccaagcgtgtgcgccgtcgatgggaagttggggagtgagaaaagaatatggcgctgtgtagacgtaaaggctctcattcgaacggaattcgattttgcattccaccaagatactgatggagttcattcacgactaacatttcgtgatggatacacaaggcggacaagcgtttcccaagttgcggcggcctgacatgatcaagctgacgaggattacgactatgaaagctcgttagctcgatcatttcaggccgccaaacttctggtgcacgcgtggatctgaaaagcaaagaaggagagagatttacgtaggaaatctgctagcgaactaccgaggaattttgtgcgcaaggcaacatcgcgaggctcttttccctctccagtgttgtagattacgtttagtcctgaggggttagcattgcgtaacgctgagacggcgaggttcatgtcgttcagtcaccaacttgatcgaatcaccgcgaccatcatgtcgccgtagtagccgaggcacctggcttcttggccggggggtaaatgaatactttgtacccctgtgactccattttcagagccaccccggcgcgcggctggtcttgccgccctctgacgagatactcgcggaaacgcgcgtactcgtgggcaggcgtgccgaaaatacgatacatatctattttctcaagttaacgaaatacgtatttgtttgtataccaaggagagaagaaataaataatctgaagaccccgtgctgacgcagtaaattattcagtaaattgctgcaatcgtgttaccttcatgggttcttacaaacactgcccacggtcgccacatccgtgttaaggttgctgaacaacatcattttagcataaagggaaaatttgatggcgttaacacaatgaaaattagggggaaaaacttctcaatcatgaaggatatattcaaccgcagaaattaaatctagaagttttgatctatgctggaataaataccggataaaccaaggaggtatacctacaataaaatattgattccgaaaatacaaatatatttccgggcgtatttatttttcgggatccctgctcgtgggcatccgccatcgagtctggagtcagctccatgaccactcgcttgacgctggggcggtcgaacttcaagaaatcccggaacttgtgcagccgcgccagctgcaccacgtccatcgccctcggcctgcatgcagtatcatataacacggcttagctctagctctagctacgtaggttacgtacgacgtgcgtggctgtcgtacagccaggcgttgttcaagaccgtcgtgagcggtgcagcccggcagttgcacttgtgcacgccactgcgtctaagctggatcactgggtgtttgctcgactgggcaacagcacaaacaagcaacaagaaaagataatccacacgcaatattccacagcaaccctccttatagtttagttacgtaccatcctggctgcttgggtgtacggcatcctttggccgaagactgtcgatggagtcgcttgctgccgagccgggaaattctcaactgagcagtccgaaatgcccgacggttgaccttcaggccaaactctctcagccatcagcggtccccttctcggaaatctactgcaagtctgggggcatcaaccgtaactttacagttaacttagttgaagtggccaggtcagccaacttgtgtggtccacttagctaatcaaacccatgcgtacacacatcctacacagcgcttgaagtctccgtccaaccgccagtacgtcaacccccacgtcacttcaccttgcgtgtcaatctcaacccccccctccacgctctcattcctcaatccaccgccccgccagcaagtccaacaccctcaccacccccaactgcctcatggtctccatcggcacgcgctcgccggtctacggccgccacggaatcgtctcgtgctcgcagcccttggcgtccgagatcggcctgcgcatcttgaagcaaggcggcaacgccgtggacgcggccatcgccatcgccgccgccctgaacgtcacggagccgtgctccacgggcgtggggggcgactgcttcctgctcttcttcgacgcccagaccaagcaggtgcgcggcctcaacggcagcggccgcagtcctgcggctctcacggccgagcaggcgatcaaagaccttggacaggacgccagcgtcatccccagtggccacggccacgctgtcacggtacccggcactgtggcaggctgggtggatgcagtggacgcctgggggacgttgactttgggggagatcctgggtcctgccattgagttggcaagagaggggttccctgtgagtccgttgacggcggccagttgggagcgtggcaagagccaattgctgcgtggatccaatgccgcagagctgctgaatgctgacggggaagccccgaaggctggggagatctttaagaacgagaacttggctggatgcttggaagaaatcgtgacgaagggcaagaaggcgttctatgatgatggacgcattgcgcaagccattgtgagtatggtgaaggagaagggaggagtgatgaccgttgacgacctcaagaaccacacgtcgacgttcgtcacgcccattagcacgcgattccagggggttgatgtccatgagatcccgcccaatggacaggggatcactgcgctgctagcgttgaacattctgtcgcagctcacgaaggatggagggttgcccgagaggggaagtgctgaggaggtccatctgcagattgaggcccttcgtctcgccttcgctgatgccaagtggttcgtgagcgacatggagcacaacacgtcgctgcctgttgacgaactgctgagtgaaagttacgccaagaagcgcgcgacgttggtgaaccggaaaaaggcggcgatcgacccgaagcacggcagccccgagctcagctgtgacactgtgagtttccaggtcattgacggtcagggcaacgccgtgtcgatggtgaacagcaactacgaaggattcggcacgggccttgtgcccaagggctgcggtttcacgctgcagaaccgcggctgcaacttcgagctgcacggcgccaacgtagggcacccgaacactttggctccgaacaagcggccgtaccacacgatcatccccggactgtcgaccctcgcggactcgggcgagctgcactcgagtttctccgtcatgggcggcttcatgcagccccagggccacgtccaggtgctgagccacatgctgctgcacgggatgaacccgcaggaggcgctggacgctcctcgcttcatgatcgatgtggatcgtccaaccaagcccggccggagcgacggtggcagctccgttctggtcgaaaaggacctcgggcccgacgtgatcgcagcgctgcgtgacgagtttggccacaacattcaagaggtggggggcttcaagcgatcgactttcggtcgcggtcagatcattctgcgggatccgaagacgggagtgctctgtgctggctccgatggacgcgccgacggctgtgccatgggctggtaagctgcgactcgatgcctgcagtccaaaacggtgcgtaacatcaagaccacgcaagctaaagaaagacagtcgcatttattcattgtgctcttgttcttcacttgccgaagttatttgtgctggagcaagcaagctaaggctttgacgaactcgttggacttttcacccaagatcaaggcgtacaaatgatggtcgcaaggctcctcaatggctatgacggcgctgcaagtaaaggagaaaagcccccacctgcagctcccccagcttcgaccgagtcagcgtcatgtcgacctccattacctcaagtggctccgacctcctacacctcgcatgccatgatgctgcaactgcaagaataccgtacacgagtccgcaccgccttccagtccacatatcgacatcccctagcaatcgcagcctcaaacactccaggatctccatccaaacgcgatgcacatagtggaaactactgtcgaagtcgcatccttgagtcctccagacaacttttcactgctgaagcacgtagtagagcgcgtgctgccccgctctctcccagttctccgccgcgctcgacgctgaaagccgaaggaggcgtcgcgttccatcgcacgaccacttcatctcgtacagcggtcaagtcctccctcttcgcactcggacctggtcaatacgacgtcgttccccgacgacccgctacaaccggcagcgtcaagttcagtccggccgacaggtttcgagagcacgcgggcggcggcatcgccgattcacacgctccaggacctggccagtatctccctgacgatcgcttcattgctaaacgctctgctcgcgtcgtgttttcccaacttccaagacagacgcagacggcggaaccccctcgagggtccatcgcggtggctccagcgacagcggacgtcgtgtcgagctactactacgtaccagccagcggcttcgcagcaccaggagacatggcctcgaagagcggaggtggaattcccaactggagccgtagcccgcgatttccaggtcgacgacgagagattttccaaaactcggctcagaactcgcctgctatcgactatattgcgcgtaacaaggcggcaattgagagcatgtctgccgaacaacgacaacgaagacggatgcgagaggctgctatcaaaccgcagccaagaatcgtcgaggaagaagacggacgaaggttttctttggtaccgcgtcggaactcgctcttctgcatgaattcaagtgatttagcagaagttgtccataggcggcgaagctccgttggtgctgttccggatgaggtacaagatctggagacccaacagacagtctcgcaagcgtggagtacactagtcgtgctttctgtcgcgcaaaccaagttcgtgaggctgctcgtcgtggccgcagtattgcatcgactccgtcgtgctcaagaactgcgctacaaacgcatcaccttccagtcctggacacacgtccgcgatcgagaggcgatgcgttccctagcggcggcacttatcgcgagtagcaccttcagctatcgcctcaggctacgagttgagcggaagattcgcgctgcaaacctgctgcgaagttttttgtctggtctttcggtggatgttcgattcgcgatggcagttcgacgggtgcagcgccggattattgtgctccagcgctggtggcgccgagcgcggcttgttgtgcgcgcccgcgagcaatgcttagcgtacaagtggctggttgttgagcaccgactgcgcacggagcatatcgcacagatgccccacttacagagagtgttccagcctcctgcgaccgcaggcgcgttctctcctgctggcgcgtctagcgcgttggcaaagaggcgagcctcagtagtaggcgcctcagttcaaacggtggcggtggaagctcagcttccgttgcataagctgctcaaccttccggagcagaagcgatggttcactgcgcggttcgtattgagccctgacggcgtcctacgagcgtacgctacggattcggaagttgaaacaggtgccaaagccccggaaagcccgacaaaggagcgcttggaggtcgaagtgaaacatttccgctgccatgggcacggatttgcgaatgcatctccaagttcgacacgtggggctgagaatgaaggggatgtcgagtgcagaccgtacttgatggtgttcaggcctggtgccagtcgattcgtgctgatcacggatgcctcgagtctcgttctagcgccattgctcgactggaaagacaagctggagcggctggctggatacccgctcggctcgcccttccccggcggtgggtcccagcgcgacattgcagatatgctcgctcaaaccaacaatgccgagctggaggaggcggaagaggccccaggaggaagttcccgacgaataagcattcccggtggctccaacggtgaaagggtcacttcgatgtcacaagttcgcaagcggagcagccgtcagcgtctgcgtcgcagcaatgccgctcagcctatcgctgaaggcgagttgtcctattacgtcgtggatctgcttcgtgactgtccgcggattccagcgccaatagtgtggggagctcttcgagacaaactgcgcgaagaacgcaaaaacttccgatccgagatctaccgcttcaagttggagatcgctcgatatcagcaacatgaacgcgatcggcgtcaactcgtcgtgctcgacaagttcaaggagttcttcgtacgtgtgtatcttgcaactgtaatttctctgttggttaaccaaacgtttattctttttaacagacgatggagcgacctcgccaccctcacttccgaagtctcatatcacaccgcaagatggaagccctcgtccgccaaaccatcgagttcgtgaaaacctcgcagccgtacaacccaagattcatgctgccttcatgagatcccaggttcaatgttacctggacttttcacttaagtatcgcacgatctgattctgtctatctaggaactcaataaaaaactttagcgggaggtcatatctgactctctgttccaaaaatatcagatccgtcccaaaaacctattttacctgacttctggatttccgttacgtagccattgctgctggacgcgcgccattgcttcaattgtgtcattccgagatatccgccgaccgcaagggatcaacaaccgaagcgcatgaaggtctggagcgtgttatacgtcgcagcagcgttgctttcgcctctgctggaggaatgcaacgcctcagctgcagcgcaccgtcaccaccacgcatcgagataccgctacaccattgaaggcacgaaggcaggaatggacgcagcgctgcggacagcacgcggccacctcgatatccgcagtatcaaagcaattcaagacaccgaccagccagtcactgcggatacgcaagtgagggcggacgtcgtgggctccgacaaggacgtagaggcctttgcggccgctggggagctccactcgaccactgacatccacatgggcaagcacatccggggcaaagtgtcgacggcgtcgtccccgttgaaggttcttaagcacaaagagtacaacgaggctcaagtcgtggcgaaggacagaggggaggtcacggcgtgtctggagcgcacggaggggtatctggacgcgttgaaagagacggacaatggatcgagtagtggagtggtgtacactgagagcccgttcttcgagtgctttagaccgtcgcacgaggtttttgatttcctcgacacgctgacggagcagaacccgcagtttattaccaagtacgagatcgtctcggtgacgtacgagggccagtcgatcccggctttcaagatctcgaccaactcaggggagaccagcgagaagaaggtgctgtacacgcaggcgcttatccacgctcgcgagtggcaggcgggagctgctacgttctacacgatggcgtccatgctggacggtcttcgagctggagacgaagccgtaacgagtttgttcaacaaggtcgactggtatttcgtgccgatcgtgaatattgacgggtaccagtacacgtgggaagtcgatcggatgtggcggaccaaccgccacattaccaaggtgaacggtagagatgctggcgtggacttgaaccggaactggccaccgaaggagtatttcaaccttgaccccagtgacgtggacgaagagacgtaccctggtgaatacccactcagtgagccctctacagcggggctgtttaacttcattacgagtctagagtcgctgagtggcctcgtggacatgcatacgttcggcgggcaggtgctgcgtccattcagcaatcaaccaggagagggtgctgagccgttcggttcaagaatgcgagcgctgggggatagcgtacgtaaggcgctatcgactaagcctgaagtgcagtaccaaagcgagacgggggcgtacctctacaaggcctacgggtgcttcgacgacggcatgttcctgcagttcaacttgacggtgccggcgttgacgattgaggtcgagggtgacgactttgtatcgcctcaaagtagtatccgccccgtgggtgcgaacatgtacctgggtctgcgtcaatttgcacacgaggcgctggagtacagcaaattcgtcgaggaaatgtatgccgacgacagcgatagctacagcgacgaggaataatttcccatgtgggtggtaaatggttcaaactataagaactcctacctgccactctccaaaccactagaacagtgcaaacttcttggaaatactagcgagggtttggccataggaatcgatgatcttcctgtcagagtatttttcaaaagtgattggaatgctgctgcaactggagaatcgagtggaacaattccttattggagtcttggttgtgggatttagaaatgaacacgacacatggaaaagtacgacggcctttcggttggacaggttcagattcgattccgattgatgggaatgctcagtatccgcacaggacttcgcgaactttcggagctagccacacaatgaacaacctgacgctcccatggacctcccgagccctccgtgtcctcattcgagtcaatgaaagaatttgccgaggttgagggtacgacgacttttgcagtgacctgcaggatgaaatgagggctctgcgtttgaaacctgctcaaagttctagcgagagtcccaaaattattcaattaatggcaacagctaaggccgacagggatcgtgtgtgctggtggaatctcgagaattattcgaatggaaatgatggaattcttcggaatctggggactgggacctacttagtggtggccgtggtcacgtacttgtgcaccagcaacaacttctcgatcggattgatcaaagggtcaacaaccgtcactcgcccatactgcatcaattccgaaagctactccaccagtacgctgacgtgcactatgcgaattggagatggggaggaactttcagcccagtatgaaaagcacaagttacctgacactgattcgtctaggagaatagcgctttatcatcaaggattgcaggtggcacgggtcacacgcaactggcagcatcagcctctccatccttatttttttttttacatatttccgatactgtacttgaccaattcttgcctgttttgtgtctctcttcgaagtcgactttcctaccgctgcgtcaaaaaattgtgtacgtactgtattgctacaatttctatagaagtgcgaaagcgagttcttggagaggacgaacaaaaagtaagatcacaaaatattaatcgtgaatgagcccatcagtatcttggcttgccaaagactatggaatgcgaaatcgaaccccgttcctttacgtctacgcaacttccctcactctcctatttctcacggacggcgcacacgcctggaaggtcttgctgacggcgcacaatggttgtgcgcgtacttcccgctaagtccgcctatggtctgcgtcattgggctgtgtgtcccccagtccaagcttcgccccaagtgtggctcgaagcgctttgcggtaaacagccaccacgtggggatcaagcgcctgtcggagagcaggcaccacgtggacatcaagcgctggacggaggcccggcacttcgcgaagagcaagagcttccacgacgggatgttcctccaggacaacttggcggtaccggcagggacaagtgaggtcaagggtgatccccgcaaaggattattcgccccatgggtgcgaatatgtacctgaggctgcatcaatttgcgcgagaggcgctggagtcccgaggaagtgtaagccgacgacaacgatagctagagcgacgccgaataatttcccgtggttagtcaaatgcttcacaatatggtaaaattccccattcctcttcgttaatcataccactgcagtaagcgcatctcaagagtattttttccgaagacattgtagttaaagggttattttgacgagctcgtagttcgaagaactgtcgattaggggaggtttttgaatggcatcgaacgacattcatactacacggaccgttgccatgcctcctcaatcaacacagcgatctgatggatcgataagggatagatagagatgatatcgcagacaaagtcgctctgaaatttgtggcttaataaacataatggtgaaggattatagctttctagttatactgggaacacccgaagaatgagggggtggacagctcccaacggattaattggacgcgtaagcgtaacctggcgcaaccttcgtgctacaccagccagaaggatgtcgaccgagcaggttcaacggtaactttcagcaagacagactgaggcaggaaatgcacgtcaacagagcttcagaaagtgaactgcggcacgcgcgatattcatgggtgtggcccctgcggggccacgcccttgaatcacgcgggctacagtcatcacggcaattagcaccggtaccagcaccagcattttattccacaggtgttaccagccaagtcgaagacgatctagtttcacaaaactctcattcagaaaggatctgtctgaaagatgtcgagttcaggaagagagcacattacaacaagcaccgccctaagtgcttattcacgttcatgaatacagagcaaattgatacagcgcgaaatcttaccacattttttttaccaaagctagcgacacggcatgcccgcaaacttgttaatcagacccttcttctgcttgttttagtgttcgcaccaacactaactgtatagctaacagtagtatttgcaaactgtttgttactgtgttgtgaatctggcttacatgtttgtggagttacttaagtagaccattgttaactatgaactaaaaagagttgaagctcttttcacttgtcggaagctgacttgcacgcgaaggtcttcttcttagcgcgattactcttgctaaaccgtggtgtgtacatggattgtggactcgacaacgggtgctacttaattgtgagtgcgtttcactgacttctgagtaattccacataatgggacttaggaagatgacgcgtccggcatgcgccaccttggaccagaccggaggaggatacaatgtgaatgcatctggggaagtaacgcatcgatccacttatgcggacgtgagtaagctaatagggagttcagcgtcatctagcagaaaacaaaagataagttgccttaaaggggttgtagcacgttatttgtgtacgtgaatgacatcccaacaagcaacgtctttagagtttagtcaatagtttcaagctgacgcatcgctcgagtttaaatgaagtttacgttgtactcgagcacattactccttactcgaaagtccgcgaaatgtactcaaaagtaaggatgacccggtaacagtagacattaatttgatctgctagtgatagagcagcaaacatacaaacgcgtttgcaaacagcactaactgtaagtaagtgtgttgtaaaaatcactaacatgtttgcggagcacacaagccttcttcatacttaagcacgatcattaccgcagtgtcacgatcatggaggtgaagcagggtagaactactgtgtgtgtacgctgacattccggtcgaggggatgctataccccaagctgggagtcaaaactttcaaaacttaaagctgagtagtcaggcaagttagaaaaccacgttaggaaactggatgatcattgtcatgcttttgcgtgaaatgccgcaagttgaaacgcgtgctattaaccgcattacttgtagttggttgcggctcgatctcaagtaaacctcaacggtgatgcgagtaatttgaaatcgcaggcacctagagtaagattgtacataaatacccacaattcgagttatatacaaaaccgtttacgggtccatccgtaagaatcaagctaacgggggtgctgcatgagcggtgccaacggctttgctgctttgtttcgccaaaagagtatcaacagaacggtttcgtctgcattttatgttagatattcataaggcaaggtcttgttctaaacatttctgctgtgaacactgcaagacattgtactaggcattaatgagcgaagtcaagctcgctgaagatgctagtgggctcgcggatacgcattgtcatttgagaaaaaataatgtttctataaaaaactctggacgtgcagttccccctggacgcttacgtgaaacggcttcagggaaagacctcacacatgatatttacttttgtgaaaaaaaatgcttgagtcctccacccggatccacaactgagctcaaaattcgcgaaaagtctacatgtatttagccgtttatggcttgaacgagaacgagtgctcattgttgtaggcacttttgtacttgcgccagatgacagcgttcgggctgctgtccgagtccagctttaggacgctcttgtagacgacgtccggggtcttcttttccaccatccactgcttgaactgggcagtctgcaggttcttcgcgaattgctccgtcttcggcactttcgtcgccgcttcaatcatcgtcgccagcttgtcatcaccgtaactcttggtgaacgtctggatcatcgtcgtcttcgcgaacggatactccttattgtacgccttcatgtacttgacccacatgtccagcagtgggctgctgaggagatcgtcccctgcttcgtcaagcttcatgatcttgaacctgtttgccgggtgatcgggattggccagccaacccttgaccatctcgtccctgaacttcgcagccccaggaccgtcgtctagtgacgtcacgagcttgagaacgccttcttctccatagctcttggtgaaggccccggccaccgtcacctccttcgtggggttcttgttgttgtaagacaccaggtatctggaccacattttgaattgaggactgtcaaataacgcgtcactcgccttgtcgagcttctgcaccttcagtacatcggcagggttgagattcagcttcagccagcgactgagctgcgcagcttccagagccgtggccatttccttggtgcttggatttttcatcgcagcggaaatcgtcttggagaagccgtcaccgcccaagttgatcgtcatggccttcgcgatcgctctttctcgtgtgtcatcttcacgtactgctgcagcaacttgaactccttgctcgccagaagattgtccgtcaccttgtccgcctgcagagccttgtaggcattacccacgcttgtttctttcttcttgagaccgtcgaggagcaactttacctgcacgttgtcgatggcatcatcgatgaagcccaggttcattgagctgaagaacccaaccctctcttcgtcctcttcagaagcatccgctgccttgtgagcacccaggagccttttggtcggaatcctgttgagacgacggggaagagctggaagttcaggcttggccaacttggactccggagtggttgagatgccctcggcaccagcaagggcgattgctgccgccaaagcaatatagtggaaacgcatgaggaagtcctgaaacttaacttgggagtttgagcgagttttgagaagtgatagcaatctctggtgtttggcagtgtggggattaaagtgcagatccttcgtagcacgttgcagcgctgggatggaggaaacaggtgccgtatcgttgaaaaaagctgctctccaaactcgaaaccctcgtagtattgtgctcgggaatttgggtagtatggttggtgaggtctgccacctagaaaacaaaacggcagtttttactcggtcatcaacactaatgtgacgctatctgtgtggtatgtagaaacagatgatcgcctcaacgtctggggagcacgaaaaatctgaacggcaacacgaagtaacattcagaaaccgaatttttgtggagtacaaatttaacaatagcttctattgctattttatcacaattttttgataagcatcaagtcgtggactggtacagcgatgaagcatgggcgcgacgacgacgaagacacccccgactactctctccgccagaagaagcgcctgaaggatgcacacctacctcgcactatccggtttctgcctcacgtcatgaagcgtatcaaccagttcgccatgaccatcgttctggaggcgttggaattggcgctgaagcacgaccactacaaagcagctcgagtgatctgtgagaatagcaaaatcccgggtgaaatatacaagtggtcggctgagcacgacgatgcgcaagtgtttgacgacgtgtactatcaccgtggcgatagcgatatggacaatttgtaccgcgctctgctgattgcggtttctcgagggtgcgtgcatatcaccaagaccgcgttaggcagacgcggcgccgaacttctcgattacgttgatggcgacgacagttccccgtgcccactggttactgcgatcaagcacggccaacgcgagatggtggacttcttgtacgcccacgatactggctgcgaagatgactcatacgtcccagcgttctgcactgcagctgcctacgggccgttggagctggccaagatgttctacgacaaggaaaaattcgatggacccgcgctggagctggcgtttgcatctgcggctagcagaagccaactcgagaccatgacgtatctatgatcaaagcgtgaatttgatggtaaggccatcgacaaggcgttcgtgtggcggcgagcaatggccaactggaggctgccaagtacttggagaatattgaaggccatcgagtttctacggcttgcgcagcttgtggctgtcacttggaaatgctgaagttcttggatggcagaggaagtttctcccggaaagtcgtcaccattgcatttgagaatgcagtgaaggacattccagaagtgggcgacactagcaaagatcaagctcgtgttctaaagttcttgtatgacaaagggagcgtgtaccctgaggtgattgacgagctgttcccatatgcaggtggccactgcagtgccgcagttgtggaattcctatactctactggatccatttcagtgcagtctattgacgaagcattccataaggcagccggagataactgcatagaagtagtggagtccctctacaaaaccggcaaaattaccaaaagtcgtttgaggacgctttcttaagcgctgccaagcgagcagatctctacgtcatggagtgtttgctcagttgcagatgtgatccccatacgctggtcgacaaggcgttgggcaagttcacatcgccccgtgatcttcccgaacgagtcttccactttctgaggcaaaagcagcagacgctgaaaaagtagcaggttccggctagaccacaagaattctttgctgagagctagaaacgactcgcgatcaaggagtgtcaagtttctaagtggtcctgcaccgtgaagaaatagagcgctatgcattcttgaagtagattttcttagattctattcaagaatgaaagaaaaatggcgtctgtcaatctaatattccagtttgtgcaaatcgttatattgcgaatgcactcgtctcaaatattgcaaatacattcgtcagtctcaaaaggctggtcctacagcccatgtttcggaatagggttagggataaaggcatactaaaaccaagtaagatctccaaacatgtaaaacatgctgaaatcatggacatccatgttttggttttcaggacgggtgtcatggcacccaaatctattgcaaatccctgggaactgggtaatcgagctgctaaatgtggctctacctgtccttaaaatctttagaaggccgacccagcgctagacagggaactgtagacctaagccttacttcggggctacgtttgcgggtcgttcatgcttctcaaacgccactgatgccgatttggtctcggcatcacgatagatttgcgggccatttcaccccctccaacccgaaaacatgggctgtacattttccggtctcaaaagttcgcagtcgagatgaaacgccctcggtactccagcgatgccaactacgacgctcgccagctcaagcgcctgaaggaggccaagttcccgcaccgaatccaggcgctcccccatgtcttgaagcgcatcgacctcttctccacgacccccgagcactcggcggtggaagctgcggcctccaatgacatcgactggctgcggacacttttgccccaaatcggccaagacaaggaccacgtcgggtgtgcagccacggacgtcgcagccgctcacggccaccacgaggtcattaaaactatctttaagtggtaggtaaaacccggctacaagccgcagcaaatgtgcaagcaagcgttaatgaatgccgtaaatggaggacacgccggtgcagtcaaagttctgctggcacgttgggaggaattcgaccttgacggcgacaattggtattacaaccattatggcaagcactcgccttacagctttgacgtgatggaggcactggaggaggcagtgacgagcgagcagaaggagattgttcggggggcgcgtttttttttcattcttttagcggctactttccatttatggtcaaaaagtctgtttttcatgtattattggctagttttcatttcgattgtgttattgcattcacaagggttatattgcattgattgagctcactgcgttcacttgtcctacaaacgccacttagtgattatcagtccacttgtgtatcctatacttagtatacatttctggcgcccttagcgaccaagtacgatcccttaactatggagcaccgtgcccgcttttttagagcgctggctgcataatgtcacgttttcacttacgattgtatttggcaagtcacgtggactgcgtgaaccctccatattacaagaccgtgtgtggaccacacgccgccgagcaagcgaggcgaaggcttggcttcaactttcgtcaagagccctcgcggggctccgcttggtttgttctgtacataaatgaagccaactattcgttgcggatgttatcgttgcgagagctgttacccgagagtacccgaagggttacgaagcgcatttgactaaggttcgttatgctagatagtgaacgagatatatttacaccgtacggcagcttagccgcgataaagagaaaacatctgtttgagatttatactgaagagactagagtttactcttggagtccgtaaggtgtacggactcgtacactcagatattagagcgaactatcttaagcgcagagtctgtgagccgattacgcttcctctgattgtacgttacgtcagccccgctgcaataaacatcaaaccatctaccgtaactacggttcctgtttcatatacagcatcttctttcggaagcaagacactacagcactatgcagaactaggctcataagctggtgcttagggttgactacgtggtacgatctgtatctgctagccagatgtagtaaggatgatgctacaacagaacccccaccccccacacaccatacactcacatacatacacgtcaaagcattccaagtatgcacacagcatggatttaccgcctggtgtctgctaacgtagtaaacaaagctaaaagcttgtacactggaagtagatggatttgaattggtgcagcagtaatgaaagcaggttgcacgtattccgcaaaccattctatgatatcaggaacccaacggcgttcacagatgcgcgagttgagacaattggactcgtctgtcgcgagaacaacccacaaaacacgacaggatcattagcatgctcttttggtgcagcgcaaacacgaaaccaataacatattcgacgtggcggaatgcaggagaggccggtgacggtcaagatgagacttgaggtatgtgtacgccaggtagcccaagtgatcagtgccaaacttgcatctattgcgaattagttttagaacacgaggagtttaaaggttgagtgcatcttcattcttaaattaagccagagccgagctaatcgggcgagtctgatggtgtactgatcaagcaacgtggcttctatcttaccaatcacatatcatctaaacgatgaaccaccgacggtagtagcaactaacccgtttaagcttggtacctaacacttgcagaacttctaataagaacaccatctacatgtacagtaacagcgttaccaatgccgccatagacgcaacgctagttgtttcatctaagggttacgaatgtgcggagctcgctgagcgttagctggacctgcaccactgcaccatcatctgcacacaaacacacacacatcatgctttaactacacatcatgctttaactacaccttttggctaccactccatgcagttaccacgcgtagaaaggctccgcacagattcacaccttgcctgcttagcagcagtggtagtaggtggcgccattattcttgtaaatgcggggcgtacggctttccgccactatcaaacctaaacgtgtccatcatacgtatgtattactcgacccagagcaaatactaacgtcgtaggcataggagctcacgagggcttacagaaaaactcgtgatttattagctcaccgtttctgatgcaatgagaataattcgacgatgcgtgctaacaagtatagttcaggtgctagtccaagtgacaacatatcagggcaacgaataactcaaaggggtcgtactcctcacgttcgaacccgctcagacgaggtcgatgtagtatgtaaattataatcacaaaataggactacctgtactcctccaaaaccggatcatttacgtcacttcagtccggtttttataagcaagacccattgtctaggcttgctgagataggattactttcgagtaccgctgtgcgtccaatgtatttcaccccaatattatctcgtgttcttcaataaaaaacatctcctcgcagtagtaaagcaagtacctgtttgtttatgctggttgagcttcaaataccatagaagcttatccccagtcgcccctcttgctaggacaaacgggaagacaaatcgttttttacttcatttcagtatagtgtatcacaaattttgtcctagacggaccgctaggacaaaacttatgatacagtatacttaactgcggtaaataacggttttgtcctaccattttccttgtttgtcctagcaaagtgcccagctggggttatgggtgtttgaggtaaattttgtaaaaccagaaacgtccctccacagatactcactacgggtaacctcgtttagtaaaaattacttagcgtacttatgtgttaagactggtagtgttttgcgtcgcctcagatatcatgcatgatgtttctgcaacaacaacaatagtattatttgttgcaggcgtagacgatgcttcacacaaccgcttctatatcaaatcattttacataataaatagcaagctgtaaggggctttaatttgtttgcaaggtcctattttatggataaaaatagttggtcttaaaactttttttaatgttattgatgaacttaactgaatactgtattgacaatgaagagagtacgaaatgaaatggacgaaatgaaattaatccgtccgaaatgcaatgtagctgtcgagaatgcaatgtatccccactaaactgaaagtagccggtgagagaatgaaaaaaagttttttccattgttcgggtgatctgtgaacagacggacaacccgagacagatcctcaactgggcggcccgtcacggcaacgtccacgtcttccgttgcatttacggtatttatggcaagaagaatccgtgggatgtgttccacgcgatgtcgattgcgattggtagtggatatcttggaattgtcaagttcatgatggaagagagtggcgctgagcttggcgagtactttgaaaacgggtcctcttatggatacgagtggcctctcgtttgtgcgatcaagcatggcaagagagatatcgtcgactacctgtacgagcggaagagataccaagacaaatcgcttgtagcagcattctgtgctgcggctcaggctggttcgctggagttggtgaaaatgttgaatggctcccgcgatttcggtccatcggccctaaacgatgcgtttgcatctgcagcagaaggcggccaactcgagatgatgacgcatctgcaatcccaccagaaatttgaccagactgctatcgacaaggctcttgaagcaacggccggccgaggtcaactggaagctgtcaagtacctgagcaaattgaaggatacgagatgtcgcctgctttcctggataaatcctttgaacgcgctggcggcagccaccgtcttgaaatattgcagtacttgaactccaaaggggaagtctctcgtaaagcggtcaacaacgcctttgagtatgccgcattcgagtcagatgacgaccaggctcgcgttttgaagtttttgttcgacaagggctgtgtatcccccgaagtcattagtgagggcttttccgatgcagcaagtagctgtcgtctcgatattatggagttcttgtactccaaggggtcgatctcacctgagttggtagacaaagcttttcaagaagccacaagtcagaacagtcaagtttctctacaaaactggctttgttcgtccaaagtcggtcgagaacgatgctactgaacgtggtgatctgtacgtgatgttcagctgcggattcgactccaaggcgttgctgcgcaaagcttggtgcagacactcggcgaaatacgctttttgacacaaaaacagcacaagcttgaaaaatagtgcggctttatagtagacttcaaagtatttactattgagaggcaaatgaatagattgatttgcatttattagtatttattgtgattggttttcttcagatcctacttgttccgttcctgcatgacgactcaccgctcagtgtcctgctagttttcggctaagaaacacctggactttgtagccttgataagctgtgcgcaacgctctttccagcagttctggtgacgtgcacccgctattgtacagagtctctaccaagtagatatcgtttttcgcggcggcttccacgaatctcgatcaactctgggcaaactgcgcgggtcttacagaagtactccactacggtgcagttatcccacgctgcctcttcaaatgcatcctccgccacctcaaggaaaatcggcccggtcgtgagcaaaaactcgaccgcctcgacgcagctgcaactggcagcttttgggaagacttcattcataatttcgacagagatccacccttttgagtgcaagtacgccagaacgccagtttggtcgtcgatgatgctcacgtccttcagaccctcatcggtggctgcgcactcgaacatcttgacaaccagctcttccgcgacgtgtcctttattatcaaagaatttgaccacttcgaggtggccgcctccactcgctgtcaatgccgcttcatcgatgacagccagaatttcatgcgcttgatctgcataaagttgcttgagaattcttgtctgcccacaccctgctgctctcaggaatgcctcgcgaaccactgaagtagcgaagtcacctttagaccgaaaaaactccatgacttccgacagtccacctccagctgcaaggccaaaacccttcttgcgtagagaagcatctgatctttcgtcgctctgcattagctctacgatcttaagcgggccataagtagccgccgctgaaaaggccatctcgaacatcgaagcattgtacccgttgttctcaaccaggtactttgcgatctccgccttaccgtcttcaatcgctcttgtgagtgggcacccgccgactgcacggccaccgtaaagtccatagagttcttcaccgaattgactgtttacaaattgcacaatcggaaggtttccagctgagactgcagttagtactgcctcatagaagtacggtgtttcctcatcctcatgatactcgtgtataggtttgatcgcttcaagccgtccgttctcggctgcccacacgagcgagtccccacactcaattgcttcgcacagcagtcttacaataccgtggtggccattacccaacgctagtttcagcggctccggcgaaaaaattccgtacagcgacaccaagtgctgcattgcatcgaagtgcccagcagcagcagccttcgactgtgcgtagtcacatgctacccactccgtatattggtagcttccctccactcgtacgcagctagaatcacgtccgaacgaccgaaagttgctgcgagatcggccactttactcgccacaacgtccacctagtcctccagtcgagggaagagtgtggttaaccagtcaagttggccagttgcagaggcttccatcgccgccgtctcggctggcatggagaacaagtcgatcagctccatgacgtgaggaagagcttggacatcgcatggaaaccactttgccttgacaaacttcagtttgtggaaatcgtaggcagcagtgtcgtacacgtcgctaggtaccatcgtgccgtgtcgaattgcgatttcaggaccggatttcctcagattgtgtcgcaaaaaatgctcagttcggacgcaagtacatgtagtttcgttgctcttcgattcgcgtgtcaccagctcccgtgaaacgcacccggaattgcacagactcgccacggtgtaaatatcaccgtcggcgtgaaatatcacaattgaatgtaacggtcccgaaacaaacttatccaaaaatacccccccccaaagaaaaaatcgaattgatttgaattcaacgtgctagaacccaccaggaagtgcatggcatcaattcgtaatcgtagtacaagcataagatgtggctcctatcgtcatggttgcacgtcgatgaagcgtcattttttcaaacaaaacggctgaaatcagtgaatgaaagaagcggaatgcttcggccacccaacctacaggtggtgctggcggtgcttgggcatgtagttgtgcttcggcttgtagtggcgcttgggcttgtagtggtgcttgggcttgtactgatagtactggttgttcggcttcggggtgctggtcgaaggacgagttgtcgccggggcacgcgtcgtagtcgaaggcttcgtcatagttggaggacgcgtcgtagtcagcggggtcgtagtaggaggaggacgggtcgtgcttggagggttcgtcattgtcggaggacgagtagtcgaaggaggactggttgtcgtaggagggattgtcgttgccggcgaggtagtcgtcgacggaggagttgtcgtggcgggagggctggtcgttgccggtggtgaagtcgtacttggcgcactggtgggggccggcggacttgtggtgctaggaagcatggtcacattcggggccatggtcggcgtgccagtcgacgtgttgcacactacgttcgcccacagttgcgggtcggaaacgagcgaggcgttgtcgggatgcgagactccaatcgtccacagcaccacggggttcgacgtcatgttccactggcagcagggatcgcccagttcctggccgttcgtctggccatcaccgtcggtgtcgttcatgcagagctccttggtccacgcgtagccaacatcagcgaaagccttgccgaaattgttcgttgcggcagagtggctcataccagcaggatgcccgatagctcggtagccggtcacgttggcaccgttgggcagcatcgccacaaaccttctcgaggcctccacgtgggagacaagctcttggacgaaggcgatcaagccggcgaggaggaggaggctggggatgatgatcttcattgttgctggtgcttgggtgagagcgtgcggaggtaagccgagtgtcttggcggtggtgagttgagaagtgagcttctgtcggctggacgttggtcgggtcaaaccaccagaaccgcgatggtatgacgagaaggtgttactcaagtcccatgttgcgctagatgctccggttcagaacagtccgtgggccagcttcaagataattgattcagtcgaaatgtgccgagattgtgtggcaaagttgagtcgagttggtgaagtgaagtatctcatcatttctgtatcaccaaactgcaaagttaccagaagggtggtctttaaaatgtattgtccgcttacatattgcagatattgtctcgactgaaaccaaaagcaacggttctaggaatgatttctggtttgagccgggacttacgagctgctaagcgttgtggggcccgggaaaggtgcatctccccactggaaatggaccacctgaatttgttttcgctggcgaaattattgggttcagtcatcttggatccggaattcaaccctaagcatatcatttccgggcacgttgcacaacaacaacaaaaacgattattgaatgggtcgtgtttagatttggcaagttgggtcccaccagttcgcaccggaaaatctccatccggatgtcagtaaagtaaaacgagttcaattgagcggtcgagcgcgacaaccttcaagtgttctgctgtgtgtacggcttcatggggagggtgacatggagtgtgtgttcgacaccatggtaattgcagctcgtcgtggattcctggaaattgtcaagttcgtgacgggagagtgtggcactaagcttggcgggttatttgagagtggcatccttgttgaataccccttcgttgccgcgatagagtgtggtcagggataggaaaaaatatattggtccaataccaataccgccatatgccaatacaatacgatactgtactgcagattgtattgtaatacgatattgcggaggcactatgtattgcaataatgttctctggattttaatccagagtttctgcagagatgcgacgattcgtctaataaaactctatacttttgttctaaatactaaaataaaaatctatgtttaacgctactatctcagtataactctattactttattgacctgttctctgaaatttatttcagagctagggaggatccgattttgccattgattgatgtctggtaatttatatatccgatttggtattcataaatagaggtagcatataaaaagtagttgatggggtacagtgtcacttcctttaataaatacccgagaaacttcataaattacctgaatgttgcctgtgtcgtcgtccccctccgattatgtacgatcttgatgttgcgtgaaagtgtgttgaagccatcgctgcactatcaggatatgtacatcattcggttgccgtgaaggctagctacgaatgaattagaacgctggaaaatatggatggccgctagtccacaccagcaagaacgttatgtgattgccgatgactactgtagtgaggtgctcgcagcacaaccggtcatccctgtcgctcttacgagccaagcccccccccccccccgcatgggggagcacccggtttaacgcggcgcaagagattgaccgtgtagacgtcaggcagggcgtcgacgacggcaagcgtccgccgctgcacaccgagaaacgtccacgatcatcactttcggtttgagctgcgccgtgccgtgccgaatgcgctcgccaagcacaccgacaaagctctgcctatttggcaacacccacctccgctcccatcacaactatgccgctctgtgtgggtcacggcacgcgactcgcgggaccaaccgcactaggtcggaaaaccaactctgcatgagctagcggttgcgttaatgtttcatttaaaaaagtgttcaataccttgcatcgaaaaattgaatcaagaagaagcaataggcggtgaagtagtagcatattgttccgtgtgcagaagttgattgtagagggtaatgctccaggaaactgacgtattgctatgttctttgcagatgctgcggctgcgaagcaggcgcaggagatgcgctgtagtgagcaattgagctttacctactagatctgtctgtaatttcagagcttcttcgtgcaacgcgcgactttgctttgttatctcagaaccgttggtggattgcaatccatactgcaatgcttaccaacgctgagaaatgctggccaatatatttttcccaatccctgagtgtggtaaaagcgatgttgcactgtgtgctgcagcctaatctggctcaggagcgcccgtaagaaaggcgtgatgaccaagtttgtatactgacgtattttttcgacaggggctgcgtgtcccccgaagatacaagaagacgttgttacacaaggcttggtgcaaacacagcccccgcccctatgcttttggagcgaaagggacaagatcttgatgagacgtaaccaaaatgtccgggctgcagcttggatgcgtcatgctgtcaccacgtagaaggaacaagggtgcgttgcgttaggctgggaggactactttaaattccaaaaagtctgctcggttgtatataacgttagctcgattttactaactcgagtacaactatattttccatactggcacactttcaagaaactaatagatgtcttctttggctacgaagtagccaagtcttgtgctaatacttcgcctactgagtggtcgagtgttttggcgccactacaaagctaagccaaatccaaaacaacaaccatcaatacatgcactagcagtaccaaacagtggttacgtactatgttcgcatgcaagtagcaaatgaggggctatgcccctcatttgcagcgcctaccatcatttttcttagggaaatttcaggaaggtgactcaatattaaaatttgtgcaaaaggtgataaagggatttgtgtcgagagcacatatttcaggttcagcagcatttgttagggcattggaccacgacattgttgcctccagcggcgacatggggagtaaggcatccaagccaggggtcggacaatacagtatggaattgtattgcgaggccaaagctgcagtagtaataacggcaatatgagggcaaccaataataataattggtacaatttaagtatattgtaccattcgtgacatgagctattcattgccaaaatgtgacaggaaggccgtaaacttcacgcgaactttacgcaaacgtccaatggctgatatcgaactattactgaggtgtcaggccaacctatacagtgagaaaatacaggtggaggctgatgacgattacaatagccctgtactgtttctaggacggttttgagaagtgttgctgtccggcaaagcgctattgagtatacaccacttgctccacaaaagcctcgcaacccaaggctatgtcctcgacccgaaaaatagagattataatagtttattatagcattttcatcatttatgaacgcccaaccccagaattcataaagtatttatattgtattgctattattggggcaatatcatattgtattggtttttatgaacttccaataataaataattgtagtgggacaataccataataattgttttactaaattttttttcgacccctgatccaagccgtcggtgatgctttatgcagcgtgggcagtgtcgcttaagcgacacagaaggcgaccgtactccaccagaacaactatcagcagagggcaatgcctacaccggcaccgccttcgcgtttacccagtgctatactgacacaattggtgcattcagcgacgtgcatggcattcaggtgctggccgctatcggtggccaaatgaaaccattggcgggaacccgggttcccgcaaatgataccgaccaaatcgcgaattatttatttaattttcggccaccatattggtaccgttggggcaagttaaaccatcaaactcgatgaaagagttcccactaatctgtcaccggtactgagtagacctgaataacgtaccttaccatgtcaaagtccaccttacgtgagcaggaggttagcaatgtggccggaaagccctctcccgctgtaccaggcaagagtctggattttcatgagagacacaggacgggagcaaagacgaattcaccttccgtttctctaccgagcttaagctacgttcaacgtaggtcatagaacaacactccaatacatttgatcatacatgggtaccggtagttttggagaaaccggggtcccgatgggtacccgggtttccgccagttgtttcaaatgcacttggcacaaagccttgtatcaccttttgcacaaaatttcattttgagttcatattcattttgttcatattccggaattttccttttttatatggagtcaactatctactgccggcgaagctgcctaccggacagattttatagtttgtgggccaagagctaaggacgtaagcgtttgcagcgccgaccaccattttttatatggagccaatgatctaatgccagcgaggctgcccgagatccaggcggacaggtttaatgtaggccaagagctcagctgctggacatatgacatcctcagttatccgtcagtaactaggaactatggaatacattgtagttgtaggctaattggtcatcctgcattctcttgtcgctaacgctgtcctcatttctttgtcaattggctttgtgtggtaccagtcgtgatgtcaatatggctatatttgtgtaggtatggtgtacgattgtgtgagtatggtgtggcgagatgctgtttaaatgttgcctgaggtgcaagcaaattcttttcgacgaattaatctgtgtgaggctgtccatacagctcttctagctgtcctcccaggataaaatgagaatactacacgtaaaatgtgaatagattccgctgactcgctgcgcgcatgacaaaaatgcgtcaaacggcagctcagtgccctcctgtttttcggttaagaaatatctggacgatgttgtcgtgaggggctacacgcaaagccctttgcagcaattcctgcgacgtgcatccgcaattgtatagggtttctaccgcatagatatcgttgtcttctgcggcctcgacgaacaccttttcgatcagttgtgaagaaaccgcgccggttttacagagaaattccactacaggggcgcagttttcgcactttgcatccggaaacacaccttccagcacataggacggaattgctcctctggtgaacaagaactcgaccacctcgacgcaactggagttgacagcttccgggaaaacctcggtaataacatcggaagagatccatcctttcgagtgcaagtactccagaacaccaacgtggtcgtccatgcctacgcactttagaccttcatctttggctgcgctcagaaacatcttgacgcccagctcttcagtgatgtgtcctgtgttatcaaggaacttgaccacttcaagatgaccacctccactcgctaggatagctgcttcgtgaatgtagtcaaagcctcgtgtccttcagatgcataaagttgctcgacgatccttgtctgcccacacccggcagccctctcgaaggcctcgctaaccactgatgcgtcgaaggcttcttttgatcggaagaaatccattattgccgattggccacctccagccgcaaggacaaagccctaactccacgatttcaacggggccgtgtgtagctgcagctgaaaaggccatttcgaacgccgaggccacgaatccgttgttcgtgtataggtacttcgcgatctccacctggccttcctcgattgcgcttgtaagtgggcacccgccgatttggctgccgccccgctcactcagtgtctcgccgaatgtctcgtttagaaattggacaatcggtagatgtccagctgagatcgcagcaaattgtgcctcagagaagttaaatagaggtgtgtggtgattgaagggatgcgtggcccccgacgcctctagcctttgcgtttgtattgggatcgattgcactgttgctcgtagaggtggagccctggtaggtacgtgtagcgagcaccaactatgctgcggcaacaagatggcgctgcggctgagcggcgtatcgttcagtttgccggctcgctgttcgaacgggctgaattcggggtgagatcgcgcgagtttcgttagcggagaccacggcaccaaagccaaaaatgctgaacagtcttccgggtgatacttgcatacaagtttgaccgcttcaagttggtcgttctcgactgcccagaaaaatgatttcactctccattttctcgcacagcagtcttacaatttcgcggtaccccctgtccaccgccagtttcagcggctccagcgaggaaaccccgtacagcgaagccaaacgctccagtgcatcgaagtgtccgccagcagcagccttcgattgagcgtagtcagctgctacccacgccgtattactagtagctttcctccacttgtaggtagctaaaatcacgttggaatgaccaaacgtagctgcaagatcggtcactttacgagccacaacatccacttggcccttgacccggggaaagagatcctttatccagtcaatttggccagttgctgctgcctccatcacggccgttttggctggcatcgcaaacaaatcgatgagcttcatgacgtcagggagagcttggatgtcgcgtggaaaccactcagccttgacgcgcttcagtcgatggggatcgtaggcagcagtatcataaatattgctgggtacgatcggtcctttgtgggctgcggcatcacgactggacttcctcaggttctgtcagacaagccgctcaattcgaatgttgccagctttgttcattttcgcctcgcgtgccatcagctctcgtgaaacagacccggattggtacaaactcgccacaatgtaaatgtcgccctcgacaactactaggttcaacaacatgtgaaacatcagggtagtgatgacccctgtcgtacacaggaatgccatgacgccactgcaattatcttccaccgcgtgaagaaaagccttctccgtcattcgtggagagatcgagccttttgtgtacaagaactcgacaacttcatcagtactaagctgtgcagcatccacaaagatacttcggataaaactaggataaatgtgccctgtagcaaacaagtacttcacaactccagcttggtcgcgagcaaccgtctgagccatcgccgctctcttaagcgccttctcaatcaccttacgcgagaacttgctcttcatattcaaggtcttgaccacttccagatgcccttcaccagctgcttgagtcagcgcttcttcaactgaagcagttgcaggcttgaacccttcgatattgtacaggtacgtcaccgtatccgctttgccaaacattgccgccatcagtaacgaatccccgagggaggcggagtcaaaatcttctttcgaccggaaaaactccataatctccacttggccgccaccagcagcaaactcgaacgcggcgttcgaagcaccggcatagacaccatcggcgtcgaagagcttcagaacttccagggggccatcgttagccgcgccaattgacaccgtctcgagtgaagaagccgtatagcacttgttagcatagaggtatttgaccatccccaatcgtccctttttaatggcacatgcaagggggcagttgttgtcgccaacttcttcgtcgtcactgtcgtcgttctcgtcccccgtttcttcttcgtcttcctgctgttcttcttctgcgtctgcatcatcatcgctatcacccgttctattctcctccttcttctctgctgcctttccccctttgccgcctcgaaatactacatccccgtacgtctcgttcaagtactgacgatttcgaaatgtccgaagtcggccgccatggccatcgctttgtacaaagtactcctccccttgtgcgcatcgaaatctggctgtccgaaaacaattaatcaggcgtttctgtttcggggtaacgcagtcccaccactcgtagactgcggtgataacatccgagtggccgtgagtggcggcgatttctgtgagtttctgcgctgtttcgttcattttatcgcgaaattgtggataactcaaaatttgttgcagccgctggacctggttcgtggctgctgcctcttgcaaggcctcctcgggggacatggcgaactgctcgacgaggttccgaaccgtgggctgttgctggacctcttgtggcaaaggcaccggcttcagtcgcttgcgcggggacaacgcagcaggcggacccgtgccatcttcgcgccgattgtgcttcatggcgaaaatattttgagtggcgatgaaaaatatgcgccctccgttagaaatggagttgttcgtgcttagaaatagaccgaactgagctctcaaaattgttttagaaatagacccaaacatttgaactcaatatttcgaaaaactaattgcgaacaactaaaactatgcaattgaaattgaaatatcaagcttatcctgacaacgtatgtacagcgttaacctgtttccgacgaatttacaaccacgaacagcttctccttacacgccagcgtagccgaagagcgtgaggctcgacaccatgatgaacatgccggcgaacatgccgatggacacgaggtgcgtcttgcccttggcgaacttgtacgccgtggggatcagctccttgacgcagatgcacaccatgatgccgcacacgattccgaagagcacgccctccgacacggggtccatgccgtcgccaatcgccagccacgcgatcagtccgccgatcggctccgcgcccgccgagatggcgcaccacatgatgccacgccagcgcgagcccgtggcaaagtagatgggggcggcgacggcgatgccctccgggatgttgtgcagaccgatgcccaccgccagtgagatgccgacggacgagttctcgagcgcgcccacgtacgtggcgattccctcgggcaggttgtggattccgatggccagcgcgctgagcacgcccatgcgctgcaaggcgcgcttggcgctctcgtccatcttcatctggtacgtggtgcgctggggcgtctgcgactccatgtactctactgcgggcgtgttggcgtggctcttggtgcgctcgtactcgtcgatggactcgcggacgccctccaggttgccgatctccgtcatctcgtgctcgggcgcgatgccctgcacgatcatgtcgatgaagtagatgagggcgataccgatagcgaagcacgacgtggccgagagccagccgtgacccgtggccgtctcctccgacatgtcctcggtgcgaaggccctcggtcagcagatgcaccgactcaccgaagatctcgacgagcgagatgaacatcatgacacccgacgagatactgagggcgaccgccagactcatcgggttggccaggtacacgaggcgcttgctgaagacgaccatgccgcccaggatcgtggcggcgccggcagcgatgttgagcgcgaaggcgacggcgacagcgtggcccgtttgaaccatggtctcggcggtcttttgctattggaagagatttggcaaatgcggtcttacccccggcatggccatggcatgtaaaaagtctgcgtgcactgtttcacgcgagcgatacgtatgtgcgccatgacgatggcttgcaggacagcgagcgagccagcgtgattcaacgggtgggccccagcaacttgctgagcaagccagtcggggcgcgcgggcgggcgcgtctgatagccagaggagatgcggcgacacatccaagataccgctggtggagggcgcgagctgataatacagtacagatcgctctggctgaagctgaggattaatttaatacgaatggcaccgcgtccttcgtgcacaaaatggtccgcgagcagcataaaatacaccgtcagcccccaaggtgaactgtatgcccatccaaagcgttttcattggggcgaggcaccacgccttgcggggctcgatcaacattgatgtttcaagacgaagtgtgtccttggtgcatgggctccgttcccacgtgcccgattttgattctgaagcatgtggtgatagtgtacaatacaatttgctctctggaagaatttgcattcttaaagaaatccaacagaaaatgtgacgggtccacagtttttattgcatggggggatatgtgtacatgtgtacagtactttgctgcatttgtgttcgtgcacgccagtccgtctacagtgcatgtacctccgtcgtcggagctgcgctacgtatcgttcgtatcgtttgtgggttgcattcagcgctggtctctgcttacagtagcatcatggccagtggttttgtaggtccaactaagctacatagccgtctggcttctcaacagcggtacagtacttcaatgtgagccacggacaagttagacgccgtttgttggtcattgcggaggtgtatggtccagtcactcttcacggcagcacaccaagacaaatttgtatgttagtgttcctaacttttacagggtatctgtataccagcactacccctacaattctgtatccctccttccagcaaagtgaaaagaatacttttgtagaccacaattcctacagtaagcttagaagccctgggtgcagtattgctcaaagagtacttagtatagtacgaatggctccaacggtccacggccctgttcaggttcaaacttcagccgacgacgggccgtcggcagagctgttagggagggcaaatcactcaccccactcacgccccaattttctgttcgtcattgaaccgccaaccctcaaaaataacaagttgacggcgcgaattgccacaatgggaaaaccctctgtatcttcgaagtgtggtgcttctatccaatgagaaagctggcatcttggggggagggtatgatgttcttgctaatcaatcccacggggattaatgaagttaatcggtggctgttgattaaattattcctcttcgaacttcatgcgtatttttacatgggtggacactctggggtcacctcctcctgaggttgcccataaggatcttacaggcctcgacatgggctcacaatttacaaacctgatcccgtgtggacaggttcggccaccggaaactgtcggtcccatctcaggatcgcgatacggccgcgggggcacgcgccgacggcgaatccgcggccccgcctcgccgggagccagggtcgtcggagaaggccaaattgatggtgcaacttgcaccgcaagggctggttcctctgtgacagacagcggtcagatgggttgtgttttgctgtgcgaatttatgccgtcttcggcttgaaaaacttacaaggtgggccttccctccagaacgaattggtctgagtgtcgaggccacccatccgcttagctgctgattcagcagtcagacgctgtttcgttttatttcgccccacaactcaattcgtctcatcagtctcatgtggccctccaccttcctcctgttgctgctggcgtgcgtgtgcgccgcgcaaagcacctttgccgccgctagcgactcgtccagcgacgtgtcctcgacctcctcgagcggcagcaccggcgacatctacaatgtgtgccccgtggtggtggacttcagcgaggagcaggaagacctgtcggacgaagagctcaaggcgaacgcggccgacgccgccatgtccgcgtacctgctgagccacccgaacaacaccctgtgggactacttcaagatcgagcgcaagcaaaagcgcgagatgttcaagaagctgccgctcaaggagaaaatcaaaaaggtgctcaagggcatcgtggacttcgcggccgacacgaccatcgcccttgcgcagacgatcgcggacgccatcgagtggatcatcaacacgatccgcgacccgctcgtgggcgtccggcagatcggcaacttcttcaaggagttcggcaagaacctcaagtcgctctgggggctcatgaaggaggacccgaaggagacggccgagaacatgggcggcggtctgctgctgcacattacgcaccacccggccgagttcacggccgagacggtgctgatggtcagcggcggcttcgcggtgatccacggcctgatggccggcgtggaggccgtgttcggtacgatgagcaacgtcatctcgaaagtgctgctgtccgtgctcatgttcatccacgccatcgacgacccgatctacatcgtcacgcccctggtcacgtccattgtgaacacggccggcgatctcgcgaacggaggcaactcgagcgctgaaagcaccgtgctgacgatcgacccggtgcagccgcataagtcgtgccagatcccgaagaagttccgtccggtcttctcgacgcgggatctgtgcctgagcacccccgcggaagtccgccagctgatcttcggcacgaccaagcgcacggccaagatgacccagccggagcgtatcgcggcgtacaaccgcttccacgactttgtgtgctgctacctggaggaccaggagttcgaggtgaacgcgccgaagatggactcgactgctttcgagaaggagctggtggcgacgcccgtgaagatgagcaactgctcgcagcttcttggcaactacagcgccgccaccgtgtgggaatcgtccacgggctacggcgatgactccgcgagcctcgatgcgagcggtgacgaatagaaaacttaatattcacaacaatagaagcattgctttagagaacagcaaccaagtcctaccgtgatcccagcgttttcttccgtttcgcagcgaagatggcacggaggtggcacctccactacttcgcgacctagactgcgaccatcgagggggtcggctaaggtgtgcgaagtatctggtttagtctatagctgtaagttacagcgtgtaatctatgctaagcatagggtactacgaatctgacactattttatcggttgtgaatgccgaatactactagtagtagtataaagtgaaaatatgcgaatgcgtatctgctattggggcaggtttcgactgctttccacgtgaagttcagtcagcatattctttgtgtcagatatccagtgaacctggttgagtagcacgtcgtgatgtaaataggatgcctttttcagacagtgaatgttttgatatcgtcctcaacttctaaattgtcgctgttttgactcaatgtccggcatcagcgaacaagatgcgccatagttaggtggtatgatggtctttgctatggcctgttcggcaaagagctaagtgtactcaactattatagagggggtgatttttaatgttaaaactatgaagggttcctaattaaatataacaatacttcgaggggtatatcattagctttttctaagattttccctcatatcacaaaaccgagttggggcagctagtctacttgttagaccgcagaaccaacctattcgaagtgcatgatctctctatacaaaatctgaaggaactactatacccaatttcattcttaccgcacaagtggcgtgaatcgctttacaaattaatttcacaactttatccggcattccgaatccaactttctactccagcgtgaatacttcaaagaaactctaaaatccgcatatttgagtttcaaatccacaaaacccgcacacttccacaaaatccgcataccggcatctgatacctagggatagataacccgcgcgctcgaacgctgtctttgcattaggtcgagcgtgatcgcgagaattcaacatggtttgtcctgggtttacgaccgcacgctgcgcgcacggcttgtaaaccgcagtcggggtgcatacagcgctgccttcggcagcgaaagcaatcgatacaacaataaaactatcaccctgcacgcgctccgcgcgaacgcaaaaacccttgctggtaaggcattaaccctaccgcggttacgcgcgggaatcagctcgcttcgctcgcttagtgctaactttcatacagtgtgcagtgctcagagactctggaatcagacgtcggtatgcgggttttgtggatttgaaacgcaaatacttaattgagtatgcgggttttggagtttcctcgaatacttctcctttttaggtaactaataagtggcctagctacctcgtacaaactacgccatagccgaccccctcgatggtcgcagtctaggtcgcgaagtagtggaggtgccacctccgtgccatcttcgctgcgaaacggaagaaaacgctgggatcacggtaggacttggttgctgttctctaaagcaatgcttctattgttgtgaatattaagttttctattcgtcaccgctcgcatcgaggctcgcggagtcatcgccgtagcccgtggacgattcccacacggtggcggcgctgtagttgccaagaagctgcgagcagttgctcatcttcacgggcgtcgccaccagctccttctcgaaagcagtcgagtccatcttcggcgcgttcacctcgaactcctggtcctccaggtagcagcacacaaagtcgtggaagcggttgtacgccgcgatacgctccggctgggtcatcttggccgtgcgcttggtcgtgccgaagatcagctggcggacttccgcgggggtgctcaggcacagatcccgcgtcgagaagaccggacggaacttcttcgggatctggcacgacttatgcggctgcaccgggtcgatcgtcagcacggtgctttcagcgctcgagttgcctccgttcgcgagatcgccggccgtgttcacaatggacgtgaccaggggcgtgacgatgtagatcgggtcgtcgatggcgtggatgaacatgagcacggacagcagcactttcgagatgacgttgctcatcgtaccgaacacggcctccacgccggccatcaggccgtggatcaccgcgaagccgccgctgaccatcagcaccgtctcggccgtgaactcggccgggtggtgcgtaatgtgcagcagcagaccgccgcccatgttctcggccgtctccttcgggtcctccttcatgagcccccagagcgacttgaggttcttgccgaactccttgaagaagttgccgatctgccggacgcccacgagcgggtcgcggatcgtgttgatgatccactcgatggcgtccgcgatcgtctgcgcaagggcgatggtcgtgtcggccgcgaagtccacgatgcccttgagcacctttttgattttctccttgagcggcagcttcttgaacatctcgcgcttttgcttgcgctcgatcttgaagtagtcccacagggtgttgttcgggtggctcagcaggtacgcggacatggcggcgtcggccgcgttcgccttgagctcttcgtccgacaggtcttcctgcttctcgctgaagtccaccaccacggggcacacattgtagatgtcgccggtgctgccgctcgaggaggtcgaggacacgtcgctggacgagtcgctagcggcggcaaaggtgctttgcgcggcgcacacgcacgccagcagcaacaggaggaaggtggagggccacatgagactgatgagacgaattgagttgtggggcgaaataaaacgaaacagcgtctgactgctgaatcagcagctaagcggatgggtggcctcgacactcagaccaattcgttctggagggaaggcccaccttgtaagtttttcaagccgaagacggcataaattcgcacagcaaaacacaacccatctgaccgctgtctgtcacagaggaaccagcccttgcggtgcaagttgcaccatcaatttggccttctccgacgaccctggctcccggcgaggcggggccgcggattcgccgtcggcgcgtgcccccgcgccgtatcgcgatcctgagatgggaccgacagttcccggtggccgaacctgtccacacgggatcaggtttgtaaattgtgagcccatgtcgaggccaccttaatactgtaaggtccttatgggcaacctcaggaggaggtgaccccagagtgtccacccatgtaaaaatacgcatgaagttcgaagaggaataatttaatcaacagccaccgattaacttcattaatccccgtgggattgattagcaagaacatcataccctccccccaagatgccagctttctcattggatagaagcaccacacttcgaagatacagagggttttcccattgtggcaattcgcgccgtcaacttgttatttttgagggttggcggttcaatgacgaacagaaaattggggcgtgagtggggtgagtgatttgccctccctaacagctctgccgacggcccgtcgtcggctgaaatttgaacctgaacagggccgtggaccgttggagccattcgtactatactaagtactctttgagcaatactgcacccagggcttctaagcttactgtaggaattgtggtctacaaaagtattcttttcactttgctggaaggagggatacagaattgtaggggtagtgctggtatacagataccctgtaaaagttaggaacactaacatacaaatttgtcttggtgtgctgccgtgaagagtgactggaccatacacctccgcaatgaccaacaaacggcgtctaacttgtccgtggctcacattgaagtactgtaccgctgttgagaagccagacggctatgtagcttagttggacctacaaaaccactggccatgatgctactgtaagcagagaccagcgctgaatgcaacccacaaacgatacgaacgatacgtagcgcagctccgacgacggaggtacatgcactgtagacggactggcgtgcacgaacacaaatgcagcaaagtactgtacacatgtacacatatccccccatgcaataaaaactgtggacccgtcacattttctgttggatttctttgagaatgcaaattcttccagagagcaaattgtattgtacactatcaccacatgcttcagaatcaaaatcgggcacgtgggaacggagcccatgcaccaaggacacacttcgtcttgaaacatcaatgttgatcgagccccgcaaggcgtggtgcctcgccccaatgaaaacgctttggatgggcatacagttcaccttgggggctgacggtgtattttatgctgctcgcggaccattttgtgcacgaaggacgcggtgccattcgtattaaattaatcctcagcttcagccagagcgatctgtactgtattatcagctcgcgccctccaccagcggtatcttggatgtgtcgccgcatctcctctggctatcagacgcgcccgcccgcgcgccccgactggcttgctcagcaagttgctggggcccacccgttgaatcacgctggctcgctcgctgtcctgcaagccatcgtcatggcgcacatacgtatcgctcgcgtgaaacagtgcacgcagactttttacatgccatggccatgccgggggtaagaccgcatttgccaaatctcttccaatagcaaaagaccgccgagaccatggttcaaacgggccacgctgtcgccgtcgccttcgcgctcaacatcgctgccggcgccgccacgatcctgggcggcatggtcgtcttcagcaagcgcctcgtgtacctggccaacccgatgagtctggcggtcgccctcagtatctcgtcgggtgtcatgatgttcatctcgctcgtcgagatcttcggtgagtcggtgcatctgctgaccgagggccttcgcaccgaggacatgtcggaggagacggccacgggtcacggctggctctcggccacgtcgtgcttcgctatcggtatcgccctcatctacttcatcgacatgatcgtgcagggcatcgcgcccgagcacgagatgacggagatcggcaacctggagggcgtccgcgagtccatcgacgagtacgagcgcaccaagagccacgccaacacgcccgcagtagagtacatggagtcgcagacgccccagcgcaccacgtaccagatgaagatggacgagagcgccaagcgcgccttgcagcgcatgggcgtgctcagcgcgctggccatcggaatccacaacctgcccgagggaatcgccacgtacgtgggcgcgctcgagaactcgtccgtcggcatctcactggcggtgggcatcggtctgcacaacatcccggagggcatcgccgtcgccgcccccatctactttgccacgggctcgcgctggcgtggcatcatgtggtgcgccatctcggcgggcgcggagccgatcggcggactgatcgcgtggctggcgattggcgacggcatggaccccgtgtcggagggcgtgctcttcggaatcgtgtgcggcatcatggtgtgcatctgcgtcaaggagctgatccccacggcgtacaagttcgccaagggcaagacgcacctcgtgtccatcggcatgttcgccggcatgttcatcatggtgtcgagcctcacgctcttcggctacgctggcgtgtaaggagaagctgttcgtggttgtaaattcgtcggaaacaggttaacgctgtacatacgttgtcaggataagcttgatatttcaatttcaattgcatagttttagttgttcgcaattagtttttcgaaatattgagttcaaatgtttgggtctatttctaaaacaattttgagagctcagttcggtctatttctaagcacgaacaactccatttctaacggagggcgcatatttttcatcgccactcaaaatattttcgccatgaagcacaatcggcgcgaagatggcacgggtccgcctgctgcgttgtccccgcgcaagcgactgaagccggtgcctttgccacaagaggtccagcaacagcccacggttcggaacctcgtcgagcagttcgccatgtcccccgaggaggccttgcaagaggcagcagccacgaaccaggtccagcggctgcaacaaattttgagttatccacaatttcgcgataaaatgaacgaaacagcgcagaaactcacagaaatcgccgccactcacggccactcggatgttatcaccgcagtctacgagtggtgggactgcgttaccccgaaacagaaacgcctgattaattgttttcggacagccagatttcgatgcgcacaaggggaggagtactttgtacaaagcgatggccatggcggccgacttcggacatttcgaaatcgtcagtacttgaacgagacgtacggggatgtagtatttcgaggcggcaaagggggaaaggcagcagagaagaaggaggagaatagaacgggtgatagcgatgatgatgcagacgcagaagaagaacagcaggaagacgaagaagaaacggaagatggagacgacggagagagtgatgatgcagaagaagtggccgacaacgactgtcctcttgcatgtgcgatcaaaaaaggtcgaatggatatggtcaaatacctctacgccaacaaaggacacagggcgtcttcgcttgaaatggtgtccatagctgcggccaccaatgggccctttgaagctgtgaagcttttggacgacggtggagtgtacgctggcgcgtcggcggaggcctttgagtttgctgctggtggcggccaagttgagattatgaagttctttcagtcgaaagaagacttcgatgctgcctctctcggtgattcgctggtgatggcagcatcgtttggcaaagcggacgtggtgaggtatttgtactctatcgaaggatttaagcctgcaactgcgccgatagacgaagtcttggctcaagcagctggtaaaggacgcctggaagtggtcaagatcttgaataccaaggaaaatctctcgcgggaggcgaccgagaaggcgtttgcgagagcggtaacggctcataccgctgttagcgatcaagcaggagttgtgaagtacttgtacgctacgggacgcatctctccaagctttatccgaggctgttttgtggctgccgcgcagatcagtagcgttgaagtcgtcgagctcttgtatgcaaagggctccatctccccagacgtggttgaggcggcgttttcccacgcggtgggagataattgcagtgacgtgacgacatttctggcaacacaggagtactctcgaaccactcggttcgttccttattgaaattagcaattctcgagggtgagacgtacattgtggcgagattgtacaattccgggtatgtttcacgggagctgatggcgcgcgagtcgaagagcatcagacccggccacgttcgagttgtgcggttccttcggcagaacctgaggaagtccagtcctcaagttgcagcccagaaacgcacgaccgagcccaaggacgtgtatgacactgctgcctacgatttccaccagctgaagtgtgtcaagacagagtggtttgcgcgtgacattcaagctctccctcacgtcacgaagctcattgacttgttcgcaatgtcagccgaaacagcggcgatggaggccgctgcaaccggtcaagttttactgctggtgggcaccctcgatgcaatgaggtgtttggtttcgctataccgagatcctacgctggaggcgctgaagcaagcattggataatgatcaccacaagattgtacgactggtgtgtgaagctattgagtgcaagaagtcgcttccgtgggcagtcgagaacggccagcttgaagtcgtaaaagccatctacgagtttcattaccaggacggtgacatacatctgccggacgtgtatcaagccgtcttagctgtggcctcagctggagacctaccgatcgtccaatttttaatcgaaaagtatggggaggaactgtatccggaacgtagtggcgctgtcggtggacgcccactcacaagagctatagaagaaggcagggtggagatcgcgaagtacctgtacacgaacaacgcattcctagcctcggccttcgatatgatcttttcagctgcagctacacacggccccattgaactcgtacagctcatgtgtagcgacgaaaggtgcgatgcttgtctacgcaagaagggttttgtccttgcggctggaggtggccagtcggcaatcatggagttctttcggtcaaaagaaggcgtcgacgcctcagtggttagtgaggccttcgtgaggactgccgggtgtggacagacaaggatcgtcgagcaactttacgcgtctgaaggacacgaggctttgactgccatcgacgaagcggctatcctagcgagtggtggtggtcacctcgaagtggtcaagttcttcgataacaaagaacatgtcactgaagagctgggcgtcaagatgtttcagagtgcagccacagatgaagggctaaaagacgtgagcagcgacgaccacgttggcgttctggagtatttgtactcgaaaggatggatctctatggatgccatagctgagattttcccagaagccgcgagttacagcagcaccgaggtggtcgagttcttgttcaacacagggccgatgccgtctgacgtggtggacgaagcatttgaagaggcaaggtgcggaaactccgcccccgtagtggaatttctctgtaaaaccggcgcagtttcgtcggagttgatcgaagaagtattcatcgaagctgctggggagaacgctatctacttcgtggagactttgtacaatagcgggcgcacgtcgcaggaattactggaaagggctctgcgcgtagcccctgatgatgatgaccacagcatagtccagttattcctcaggcggaagaaagctgccgaatgacgcgttttgtctctttttgctatgcaagaatggaaatgataaaagggtgaaatgtattttcacatttacgtgtaacttcttactttcgactgaatctataaaactcgatcgcaacagtcacccaccacaacggcatcgctatgcttcgagcttttgctgcttctgattcaaaaagcgtaacacccgacgagggagctctttcgaagagtgcttgcgccaagctttgtccaacaacgtctgggcgtcgtcgtatccgcaactgaacaagcactccatcacatagagatcgctacggtcagcagcatcgatgaaagctttctcgaccgactttggactgacaagttcagttttgtagagaaaccgaactacttcagcgcagttgtgctttgccgcttcttggaaggctttgttaaccaacttgggagagatcgaccccttggagtacaagagttccacaacgtccagacgacatctaagtgttgcgtcggaaaaccccgcgtcaatggcttcgggggagactcctcccttgtttaccaaaaattccaatacccgcacttggacatcgcgccgttcagacagaattcctgattcaattgcagcgcactcaaacgcgctgtttatcgctcgacgagaaataccccctttgctgtccaaatgcttcaacatatcaagttggaggctgccagcagcgttttgaaaagcttcatcgagagaagcagccgaaatcgtgtatccctcaattgcacacaagtattcgagagcttccatttgggcaccgctgactgccgatacaaaagcctcatcaatagcagcctgctcaaatttctgaagcgactgtagatgcctcactatctcgagatgaccaccgcgggctgccgatgcgaatgctctatctaacgcagcagcatcgaaaccatgcttgccaaagaacatttccaccaattccagcgagccggaccaagctgcagcacagagtgctgatataaacgatgcgtctttgtatccattgtgctcgtacaggtagtcgacgatattccgcttcccttcctcgatcgcagtgacgagggggcagcgaaagagaaggtcacattcatatagctctgcaagttcagcgccacactcttccatcacgaacttgacaatctccagacacccacgaccggccgcatcgatcattgctctgaagacattctccatctcgtcctcgccatggaattgatacacacactgaaatacctggaggttgtcctgctcaactgcccagttgaagagctctcttgggtcttccgtcttctcacagatcaccccaatgatctccttctcctcgcccttcaccgcctcctccaacgcctccaactcgtcgaaatcgtaaggtgaatgcttgccataatggttaaaataccagtctttgccaagttcaaattcctcccaacttgccagcagaactttgactgcatccacatgccctcccctcacggcgttcatcaacgcctgcttgcacatttgctgcggcttgtagccgggtttcacccaccacttgaagatggttttaatggcctcgtggtggccgtgggcagctgcgacgtccgtggctgcacacccgacgtggtccttgtcctggccgatttggggcaaaagcgtccgcagccagtcgatgtcattggaggccgcagcttccaccgccgcgtgctcgggggtcgtggagaagaggtcgatgcgcttcaagacatgggggagcgcctggattcggtgcgggaacttggcctccttcagccgcttgagctggcgagcgtcgtagttggcatcgctggagtaccgagggcgcttcatctcgactgcgaacttttgagactgacgaatgtatttgcaatatttgagacgagtgcattcgcaatatttcgatttgcacaaattggaatattagattagcagacgtgattttctttcgttcttgaatagaatctaagaaaatctacttcaagaatgcatagcgctctatttcttcacggtgcaggaccacttagaaacttgacactccttgatcgcgagtcgtttctagctctcagcaaagaattcttgtggtctagccggaacctgctactttttcagcgtctgctgcttttgcctcagaaagtggaagactcgttcgggaagatcacggggcgatgtgaacttacccaacgccttgtcgagcagcgtatggggatcacatctgcaactgagcaaacactccatgacgtagagatctgctcgcttggcagcgctgaagaaagcgtcctcaaacgacttttgggtaattttgccggttttgtagagggactccactacttcgatactgttgtcttcggtcgccttatggaatgctgcttcaacggcttctgatgaaatggatccagtagactataagaattctacaactgcggcactgcagtggcctcctgcatacgggaacagctcgtcgatcacctcaggatacactttccctttgccatgcaagaactttaaaacgcgaacttggtctttgccagtgtcgcccaattttgcgatgtccttcacggcgttttcaaatgctatggtgacgactttacgagagaaacctcccttgccatccaagaacttcagcatttccaagtgacagccgccagctgcgccttcgaacccttcatccagcgaaggagcagaaacttgatggccttcgatattgtccaggtacttggcagcgtccagttgaccgttgctcgccgcttccacaaacgccttgtcggtggccttaccatcgaattcacgcttcgcctggagaaacgccatgatctcgagttggtttttgctagccgcagatgcaagcgcctttttcaaaccggattggtcgagatataccttctcgtcgaacatcttgaccagctccaacggcccgtaggcagctgcagtgcagaatgctggcacgtacgatatatcaagacacctatcgtgggcgtacaggtagtccaccatatcgcgctggccctgcttgatcgcaaaaatgagcgggcacgaaaactttttgttctcgtcaatgtggtcgagtagctcctcaccgcagctctcgaacacgaacttgacgatatgcacgcaccctcgagacaccgcaatcagcagggctcgggacagatgatccatatctatctcgtcgtggaaatcgtacacgtcgtaaaaaacttgaacattgtcgtgctcggctgcccatatgagcatttcccccggaatagtgttcttttcacagatgactcgaatggtcttgcggtggttgtgctttgtcgccaattctaacgcctccagaacatcaaagtcgtaaacctgctccacgtggaactcctcttgatcggtgggcatgccatctaactcccgttcgtaccaatcggacagtaaggctttcacggccttgtcatgtcctgctgttgctgcctacgcgcgcgctggctcgtagccgccactcacccaccaccggtagatggctttaatagcctccgtatagccctttgcggctgcaatgtcagtgccattgcacccgacctcgtctctgtcgctgtcgacgtccatttggtccagaagttcctctagcctcttgttggccgcagcctccaccgccgcttgctcgacggtcatggcgtacaggtcgatgcgcttcatgacgtgaggcagagagcggatagtgcgaggtagctgtgcatctttcaggcgcttcttctggcggagggagtagtcgggggcgtttcgtcgtcgtcgcgcgggtgcttcatcgctgtccagtccacaatttgatgcttatcgaaatgcatcaataaaattagcaacttactgtcaatatgtgtgtaaatatactcagtaaaatttatcagaaaatctagtttggcttttgagaatatgacaccaatattgacaataatttctattgctaattttattgatgcatttcgataagcatcaaattgtggactggacagcgatgaagcacccgcgcgacgacgacgaaacgcccccgactactccctccgccagaagaagcgcctgaaagatgcacagctacctcgcactatccgctctctgcctcacgtcatgaagcgcatcgacctgtacgccatgaccgtcgagcaagcggcggtggaggctgcggccaacaagaggctagaggaacttctggaccaaatggacgtcgacagcgacagagacgaggtcgggtgcaatggcactgacattgcagccgcaaagggctatacggaggctattaaagccatctaccggtggtgggtgagtggcggctacgagccagcgcgcgcgtaggcagcaacagcaggacatgacaaggccgtgaaagccttactgtccgattggtacgaacgggagttagatggcatgcccaccgatcaagaggagttccacgtggagcaggtttacgactttgatgttctggaggcgttagaattggcgacaaagcacaaccaccgcaagaccattcgagtcatctgtgaaaagaacactattccgggggaaatgctcatatgggcagccgagcacgacaatgttcaagttttttacgacgtgtacgatttccacgacgagatagatatggatcatctgtcccgagccctgctgattgcggtgtctcgagggtgcgtgcatatcgtcaagttcgtgttcgagagctgcggtgaggagctactcgaccacattgacgagaacaaaaagttttcgtgcccgctcatttttgcgatcaagcagggccagcgcgatatggtggactacctgtacgcccacgataggtgtcttgatatatcgtacgtgccagcattctgcactgcagctgcctacgggccgttggagctggtcaagatgttcgacgagaaggtatatctcgaccaatccggtttgaaaaggcgcttgcatctgcggctagcaaaaaccaactcgagatcatggcgtttctccaggcgaagcgtgaattcgatggtaaggccaccgacaaggcgtttgtggaagcggcgagcaacggtcaactggacgctgccaagtacctggacaatatcgaaggccatcaagtttctgctccttcgctggatgaagggttcgaaggcgcagctggcggctgtcacttggaaatgctgaagttcttggatggcaagggaggtttctctcgtaaagtcgtcaccatagcatttgaaaacgccgtgaaggacatcgcaaaattgggcgacactggcaaagaccaagttcgcgttttaaagttcttgcatggcaaagggaaagtgtatcctgaggtgatcgacgagctgttcccgtatgcaggaggccactgcagtgccgcagttgtagaattcttatagtctactggatccatttcatcagaagccgttgaagcagcattccataaggcgaccgaagacaacagtatcgaagtagtggagtccctctacaaaaccggcaaaattacccaaaagtcgtttgaggacgctttcttcagcgctgccaagcgagcagatctctacgtcatggagtgtttgctcagttgcagatgtgatccccatacgctgctcgacaaggcgttgggtaagttcacatcgccccgtgatcttcccgaacgagtcttccactttctgaggcaaaagcagcagacgctgaaaaagtagcaggttccggctagaccacaagaattctttgctgagagctagaaacgactcgcgatcaaggagtgtcaagtttctaagtggtcctgcaccgtgaagaaatagagcgctatgcattcttgaagtagattttcttagattctattcaagaacgaaagaaaatcacgtctgctaatctaatattccaatttgtgcaaatcgaaatattgcgaatgcactcgtctcaaatattgcaaatacattcgtcagtctcaaaagttcgcagtcgagatgaagcgccctcggtactccagcgatgccaactacgacgctcgccagctcaagcggctgaaggaggccaagttcccgcaccgaatccaggcgctcccccatgtcttgaagcgcatcgacctcttctccacgacccccgagcacgcggcggtggaagctgcggcctccaatgacatcgactggctgcggacgcttttgccccaaatcggccaggacaaggaccacgtcgggtgtgcagccacggacgtcgcagctgcccacggccaccacgaggccattaaaaccatcttcaagtggtgggtgaaacccggctacaagccgcagcaaatgtgcaagcaggcgttgatgaacgccgtgaggggagggcatgtggatgcagtcaaagttctgctggcaagttgggaggaatttgaacttggcaaagactggtattttaaccattatggcaagcattcaccttacgatttcgacgagttggaggcgttggaggaggcggtgaagggcgaggagaaggagatcattggggtgatctgtgagaagacggaagacccaagagagctcttcaactgggcagttgagcaggacaacctccaggtatttcagtgtgtgtatcaattccatggcgaggacgagatggagaatgtcttcagagcaatgatcgatgcggccggtcgtgggtgtctggagattgtcaagttcgtgatggaagagtgtggcgctgaacttgcagagctatatgaatgtgaccttctctttcgctgccccctcgtcactgcgatcgaggaagggaagcggaatatcgtcgactacctgtacgagcacaatggatacaaagacgcatcgtttatatcagcactctgtgctgcagcttggtccggctcgctggaattggtggaaatgttctttggcaagcatggtttcgatgctgctgcgttagatagagcattcgcatcggcagcccgcggtggtcatctcgagatagtgaggcatctacagtcgcttcagaaatttgagcaggctgctattgatgaggcttttgtatcggcagtcagcggtgcccaaatggaagctctcgaatacttgtgtgcaattgagggatacacgatttcggctgcttctctcgatgaagcttttcaaaacgctgctggcagcctccaacttgatatgttgaagcatttggacagcaaagggggtatttctcgtcgagcgataaacagcgcgtttgagtgcgctgcaattgaatcaggaattctgtctgaacggcgcgatgtccaagtgcgggtattggaatttttggtaaacaagggaggagtctcccccgaagccattgacgcggggttttccgacgcaacacttagatgtcgtctggacgttgtggaactcttgtactccaaggggtcgatctctcccaagttggttaacaaagccttccaagaagcggcaaagcacaactgcgctgaagtagttcggtttctctacaaaactgaccttgtcagtccaaagtcggtcgagaaagccttcatccagttgcggatacgacgacgcccagacgtcgctggacaaagcttggcgcaagcactcttcgaaagagctccctcgtcgggtgttacgctttttgaagcaaaaggagctcatttctgaagcatagcgctgtgactgtatccatacccccggaaatatctgtccggattgccccgaattgcgaccatcggtggattacagtgagagagatgtttgtggatttttttagtaaacccaaagggcagctctcaacaatgtggaagaggggttatgaatcggtctatgtcactctctactgcgtttgcttgtacaaatttgaaaaccacttctgactatttagcaaatccgacaaaccgcctcgccttgtgtcccaccttcgacattttcgtcacaggcccctccctaccttcgtgatatctttttcgccgaaaattactgctgtcacgtgaagatgtacggatgctgcaacttccgtaaagtttgaggtcgttattgaaagctttacggtggtggcggggtcaacgtaaagttacgtgatttgtgactttcaaaaatatggatttgttagctctgcttaaccgatgtctagtcgtatttattcgttgttggagtcatcgtcgagatcatcgtcaaggttcgcgcttccggaaaacctccacaccgtctcgtcgctgtagttggcaaagagctgcgtgcagttgcgcatcttgacgggcgtcgcgacgagcttggcctcgaacgcggtcgagtccatctccggagcgttcacctcgaactcctggtcctgcaggtagcagcatacgaagtcgtggaagtggttgtaggcggcaatccgctcctgggtggacatcttgatcgcgcgcttggccgtgccgaagatgagctcgcggacctgagcgggggagctcagacacaggtcgcgggaggagaacaccgggcggtactgcttggggatcttgcaggccttcaagggcttgatagggtcgatggtaagcacattagaggtggcgttcgtggaggacgagttgcttctagtgttgatggcgccggcggtgtcgacgagggagttgacaaggggcgtgacgatgtagatcgggtcgtcgatggcgtgcaggaacatgaggacggacatgaggacgttggagatgacgttgctcatgccgccgaagaccgcctcgacaccagccatgaggccaccgatcacggcgaaaccagcgctaaccgtaagaaccgtctcggcagtgaactcagcggggtggtgcgtgatatgcaggagcagaccgccgcccatgttctcggccgtctccttggggtcctccttgaagagcgtccagagcgacttgacgttatggccgaacgtcttgaagaaggtggtgacttgcttgattccgacgagggggtcgcggagagtgttcacgatccatttgatagcgtccgcgatgtcctgcgccaggtcgatgaccgtgttggccgtgtagtcgacgacgcccttgatcgcgttcttgatgcgctgcttgagcggcagacgcttgttcatttccttcttctgcttgtgctcgatcttgaagtagtcccacagcgtgttgttcgggtggctcagcaggtaggcggacatggcggcgtcggcggcgttggccttgagctcctcgtccgagaggttctcctgctcctcggtgaagccgacgacaacggggcagacgttgtacacgtcgtcggtgctgccactcgtggagagcatgtcgacggggttagcggacccgctggacgagtccgagtcgctctgcgccgcgcagacgcatatcaagaggaggagaacgagcgtggagtgccacatgagaccgaggaggagaaagtggttgtgagcgagatggagtcaagctcgacagcctttgtgtggctgtcaccgccccagtcaactgacgggatctcctggagggcgcaggacttgtacgagtcgatggttatacatgtagcaaatctgatcgtggatagcgcctgtcacagcggaacggtagcatccattccaccagcttttagttggcgcgtgccttcaaggcctccacggcgtaccgcgatcctaggatgggacccccggctcaaacgtgtgcaggtgcctgtgccttgtttgcttgtctgtatgcatgtgcagtactgtaccctcgaaacgaatgcaaccgtacagtagaatgcctcgtgtattattttaattcgtgctggatagcatgaactgtagtctcaattgcagaagtcagacgtatgatactaaagaaccacagtggcatgtcgtggattaattggatgtcattcatttcgatctttgtcgaagtactgtattgacgatcgggtggcgggtgaccgagcgcttcgcttaatcgagcgatcagggcggctgcgggctgtagtggaataatctggctagtgctcggaaatgaccgatgtaagcgctctgatccgggatattcggtgtactattcgcgccgtggagcgatttgcccgagggaaaaatacaattcgtttggcccgcttgcatcgaacagaaaaagtttgtgaaccgtctcaaacggattgaaccggctcacggagagctctttgcataaaaaagattgcacttcaaaatgcatgtacaggtatgaaacgaaaatgtggatgatgccccaaggtttacaatacaacacatactaagcactttcaaacaacttgttcatcttcaaaaataaagagaaaacaagaaattgctcaacaaaagcgacacgaaaaagaaaaaaatgtgacctttttgcggagcggagccttgctgcttgaagcctgggcggtgccagcctaattaactccagaattgtttttgagactcagggattcattggtatcggcaccgccggcaggtttcgggactgtatcagcgctgcagctaccaagcagttgagagcggctggtcaacttcacgggcgtaggcaccagggcaacctcaattttttaggtttgagtcaaaagctgcaactttaggtcgtttacctcgaacatgttatggctgaacaggtagcaaacgaagtcggcgacaaaggcccagactgactgttagcggtggagttctcagtgaagcttcaccgctcacagtacttcgatggcaccgacaaacaagatgatgggctggacgccgacgccaccgatgcagccgtgccaactcaaacaagccaactgcagcctagtacaagacttacttcaagatctaggaaagcagcagaaggccatgagcaagaaaccgccagctccagcttcttgtgacgaggcagcagaagatcgcggtcagcgtcgagtcaagcaggtggctaaaactaacttcttccagtgaagctgagagtgatgtcggggcagcgtaagcaacagcgacttggtgctacacattacccacatccatgcaaattcacattaaagatggttggtgacgggtttgagcaaaaacagatatcaaggctacatgtttgatagagctagcgttatcgaggctctaaagcgtcctcggtgcagctagctaaccagcctttagaccagcaacttagttgttcttggcgaagtccacacccttcttgatctgggcctcgagggccacgatcatctcgtcgaagttggcctgctccacggccgagagctcgccgaagtggtgcacctgctccacaccgttggggccgagcgtcacgggcgtcgagaagaagggcagcttggtcacgtcgttctgcgtgtacgagcactcgacgacgtccttggcgccgttcatggcgtccaggaggcgcgtggtgaagcgggcgccggcgtaggccatggagagcgtggccgagcccgtgccgttcttggcctgcacgacctcgtcgccgccgaactggatgcggtgcgtgagcttggcaatgtcctcctccgagaacttggcgccctcgagctgcgacagcaggggcaggatggtcgtgccggcgtggccgccgatcaccttgacgttggtggtgcgcgggttccacttctggttctcggccacgaatgtggcggcgcggaccacgtccagcgtcgtgacgccgaagaggcgcttggggtcgtacacgccggccttcttgaaggtctcggccacgatgggcaccgtcgagttgacggggttggcgatgatgagcatcatggcgttggggcagtgctcggcggcggcggcggccagcgactgcacgatgccggcgttcgtgttgaacaggtcgtcacgggtcatgccgggcttgcgcggcacgccggcggggatcaccacgacgtcggcgccctcgagggcctcgccggcctgctccatgcccacgtggcccgtcaccttggcgtgcgtgttgatgtggccgatgtcggcggccacgccgggcgtgttgaccacgtcgaagaggctcaggtggccgatgtggtcgcagtccttgagcagcagcgacatgggctggccgatgccgccggcggcacccagcacggccaccttctgctggccggtggccgtggagaaggcgcgacgcagcgtcgaggcggagatgagggaggcgcgggcgaacatggtctactaggagggcgagggaggggtcttgctagagcttgagccggcgaattcgcgagtgacggagaccgccgacaaggctacgtgtggcgctggacgacacgccttcgcgcgaccgtcgtggccccgaatggctcgcgttatgtggcgctgctgccaccagttgaagtgggtcggtggcgcgatgtcgcgcgagctgcatagaacggggtctggaccgtatttaacagcgaccgccgcggctatcccacttgcagttggctcgccaatctgaggtggcaatgcgtcgggccccgcgacgcggcatggggcaacgcggcgctgttgacagcttggatactgcattgtggcaacctcggacacctactgcagctttgatgccgtcgatgcgcccgctgcggacgattttcggggctcttgggcgtgcccaaaaccttgcgcctcatgttgatgatggatgaaatgtcctttttcgcgggagttaaacagggcgcccggcggtcagctctgctgcacgacgttccggcgtcccggggggcggggcaacctgcctggcgaaattcgccggtctcagcggcggtggagacggcgatccgctgtcggcagtgccgccgatcgcactttagctttgcgtctacaggtgcaacttcagtttcagccatttctgaagcgacgcttgtcgaagttgacgcctggagcagcgcgtgacgagcctgcgtggccggctctacggtagccgaggagatttgatccgagggtccagggcccggcagacatgaagaggtcgttgctcgcagcgcgcaatactgagcgcgtcgcagcctcacgtttgccccgtgattggcccacttcaatctgatgagcgaccccatgtcagtccccggagacctcgccgagggactttcgagtcgattccctcggcgggggaatccgtcaatgcaaatcggaatttgctccacattgccaagaatcttgccgcaagatgtccacgaatccgagggagcccaagcgacaaaagattgacccaggagcaaccgcacccggcgcagctcgcagtgcacttgacgcagctgaagctagtaaggtcgaggttgagggggaggccgccggatctgcgtccgcgtgggtggagagcacgaccaggacgtttccgtggggctgccgatggagtccgattgcctgcagccaatctactatgtgcgcaagtgctacgccgagtattacgagttggttattcgcctgcttgaggtgaagaaggttaagtatgtgacgatctcggggacaccaggtaagacggctactggattctaaacgactgtgttctgagcctgtatactgagctgaattattctttgtttggcacagggattggcaagtctgtcttctacgcatacttccttgagcgctacagcgctaagaataaagataccacgatcatcacagcctctttccttcgatcggactcgcaatcaatcaggacgaatgtggtcgtgtggaaaggcggacaagtgattggcgacgctgcggacgagaattccgcgatggacgctctccttgtgaagacgaagaaagaagtgggcaagggaggcaagctgatttacctgtacgatggtcctcctattttccctcctcagactgcacaaatggtgtgctttacgagcccaaacgagacgtggtttcgtatgatggcgaagaacccgcacaagcgaactctattcatgcccctgtgggatctcgaggagctccaaactgccgcgaaagcacttgatctggcgatggatacctcagataccctcttgaattacgaggagggggctctttcggttctggataaagtcgagcagcgctaccggacttttggtggtgttgctcgtgaatgcctgtccacagttgaaagcatcatcgagtcacggcaaaaagagatggagatatttatgtcctatttcgaaaatgtcgacaacttggtaaatttttttaacagaacagaggctgaggtggtgctccacggcgttggtcactacatacccaacccagaaggccccggattgtatacgcttgtggtggcatctgagtttgtcaagcagtttttaactgatcgctggaagaggctggaggccagcacgcgaaataaaatctgtcgggagttgcaggctatatcggctgctgcatcgtttcggggtgtgctattcaacgtacatgagaaaaccgagcagcaagatcattcagctggaccttgagagaagcgatactgcagctagtctcttgttacttcatgtcgccattagaaacggtggtgaaattacttggctgcagtctatatactactgtagttttgcattttcttacatttactattactgttttagcgtgattgttgctagttgcgccagctcagcggcatcaacttctttttgtcgtgctcgacacagtggcagccacgtgcgtggtttcacggatggagttcgggacgagatcttacgaggagtcgcgtagaatgacttgctgctagagcctggtcctagagatagcggtcgtagtgctcattgcggaattggaagctcactgatgaggcccgggctcgcaccacagcctagaattgtttcactgcatcctatagtcgcttttgagcgcgatcctaaagctaggacggccggcggctgtgatctggtgccaccggtgtccgccactgccgccaaaatgggcacttctgcaacgtaacacaatgcgggacaatctagtttgtggcactgctgccatttccgacttccatacttaagctacgctatacacgtcacgctatcacttcaacgtgcacatcttcgtcacctttcgcgccatgctgcttgcgcggttcctgcttccatcaagcaatttcaccaatcatcgcaagtattcaaacgatatcgccaatgatcactaattactcctgaaatagccaatagatttgcttacaaatttcccccgggttcggaattgaggcgcgtcttcgtgagcgtatcatcggaaccaaagctcgccgccgctccgcatcgaaagctcgtttctaaaaacgccgacaagcactcaagcgcctacaatgtcgtgatcgcacccggcccccggcgtcctctcattcaacctctgccgaacccgaagttgctgctgtctactgaggcggcatgctcgcgggaccgggcaaggccgacgcgggcagtacgttcgcggcccccggcaagatcggcacagacgtcatgcccgagcccgacggcatgcccgacaccaacgacatgcccgagcccctcgccatgcctgaccccgccatcccgttcatggttacccgggaccccgggaaggacgacccgctcgcgacccgacacgcccgcgacggacgacacgcgcgccgagcccgacaaacccgactcgaccttcccgttcacggcccccagtagccccagcaaggacgacacccgcgcggcctccgacatgccctgcaacgacgcaagaccggcagcccctgacatgctcgacacggtcgacatgctcgcggatcccgacaagctcggcgaggccaacccttccgcgatccccgacatgcctggcgcggccaacccttccgcggtccccgacacgcttggcacggacggcatgctcgctgacccccgacacgcccggcacggtcggcatgctctgcgccctcctcaagctcggttcggtgggcccctgtgctgttccggatagtcttggcaaggaagccacgatcgagtcccccgagatgcccggtaccaacgccataccggcgactccgtctgccccctcccctcgaccagcccagcgcgaacggcatgctcgagatcatcccaaggctcacgatcaccgaccatgcccgaccttgactgcgtgctgatcccaacttggacagtacgcttgcggttcgggccaaacccgatacggactgcacgctcgcggcggtcgacaacattggcatgggcggcgcgcgtgcgcctcactagaagccctgtgtggaaagcatgatcgcggcccctcacaagccgggcatgccaacgcgcctgcgagtccctcgtcgacagcctgccatacttcccggcgagccgggtagctcagcgaacgaccggggcttatgacagtttgagcttacattagagtaacagagcaatatatgaagccgttgacattgccgtgtactgcaacctagacaaatatctcaatcttgacataacgacatctatacaaaagtctagtcaaacatgtcaatgtcgacatgtctgctgtcatgataatcactatactcagatcaatacaaacatgtcgatgttgacaagtcgtcgaagcaacgttgacgtggttgaacatgcaaaagctaatacatgtagccacgtggccacaatcaacgtcgcttcataaggaccagaccgaatacaatggaagcacgtgcttctttgtctttcggtagattggccacttgaaagaagcgaccattgacgctcagcgtctcggcttgattattcttgtcatgtaagtctcgtagagaccagaggtgtggtatagcgagttcatccaccttttagttagctagtcgcctttggttcggcaggttttgcggcccgctcaaacatgaacgtgatgctagggaattaccacctccctgtgtcggaactacgtatcatgaaggtgccaacctgtgtttgagtcaaacagcggttagacggtattgctcacaatgcctcatcagcacgcatgggagcataaatcaaaacatgatgcttaataatgatggcgctcaatgtggctaaccatattttcaagctgcggtgcccacgcagcgctttctactcgttctagatccttatatttgaacggccatgtgccccctccgcctgcgcgacccagcaatgctctagatgatcggattgcttgcgttatctagggcgctccgccacgctttcacgacaacttacagatgcaacctggacaccgcagtatcggcaggatcgcgaggggtcgctgttaaggtaagttagtattatcacaactattcgctcatattttacaatattctggtttggattctctacagaaggaaatatcccgatatttaggacaaattacgccaaggtttttcccagcgtagtcttcaaccagctcagtattaagacctcagtcaagttttgattgggtggatctgaccaatgagactgaacgtcggtggagcccgaagggtcggcgccggccgctggggacctctcttaccctatcccacaagtatacaaatttctatattaattttatccctgcaaaattgggataagagcggtcgccggtgggttaatctaaataaacgatccaaataatgttttggggttaaaatgagatgctatgtatgtcgctccttggctaaaagatgctgctttcagccaataggaatcctaagtctctatggaccatgatcgtaaatgtatgtagcctttggtgtgtcgacaccaagttcgagaaatcctttcgaacctccaacagacacgacgtctgttggagttacaagtgactgtagccacttgtgcgtgtaaccctgttacatcgcgggccttgccacatgcaattctgccggcagatgtacatcgcgggccatgccacatgcaattctgctggcagatgtacataagggcaataccggcagcagcaaatgcaattctactggcagaaataccggcacttgcgaactgtacgagcaaagacccagccgtttctgctgggtgctgtgtgtgttttctctcctatgtgatattatgccgtgatcgagtagatatatggtattttgggatgtgcgcttgctgcatgaatacctgccgtctcgttgcactaaaactatgctcctcgcgaccagacaatgctaggagcagaagtttcatgctacatcgcaagataaaagctgtcgatcatgatcgtgctacagccttaaagaggcagaggagtctgcagttcatgcattgaggtgtaggaagtattttataatatataatagcgcatcctactccctgcgtcgtagcctaccgaaaacttcgtcgatggcgccaaagtgttgaacgtgggctccaccggacgcaacgccagtcggtctgccgcatgagtcaccactatttgatcctatatcgacctgccataagagcggcaaaacgcatggggactcgagtgtttcattgccgcgcttccagctcggaaagcagtctcaagcatacctggctgagagatgtgtgtgctacctccgctatcgacgcgctcaatggccacggccagctgtaaacggccacgtcgacatagttgagagacttgtagcgcacggcgcaagtgttctttttgactagtaccgatcaacgctccgccctccatcgggccgctactcgaggcatggcaaccgcagcctgtgctactgcaagctgtagctgctagctggtatttcacttcactctatgacattctagatttatgcaggtgatgtacacgtagccctgtttcatccgcttcgcgttaccgacccccatgacgatatcgtagctgccccccctgcttaaatacctcgcctttcggtcgagctacatgcgttaatagcgcgcctagttcgaaagtaggaggcagcgggggtgggctgtagtgatccctcatgggcgccacaccagaagaagcacccactgtacgcaggcattgagccggccataataccgaatttgttttgtagagggatacacccacctataggatacaggatagtactagccaatcacaattgtgccttcagattgacagggcttgacttgttgagggatacgccagtttcaagccagtaatttttgcactctcggccgctcagcgcgcgatcatttctgcaacggcgcgggcgccaccaagtcaccctcgcctgtctggaggtcaagaacgacgcgggccctaccattttacactgctgcaatgaagaaggctattgtcgagcacctgagactacactgtaatgtttgtttcactgtagatacgttctttccgggtctacctacagagaaaagtagtggtgttaagatgggctcgtcgtttagcactatagctgctgggggtgcttctgtcggcggcaggaacaaacgcaaagcttgctctactgagcttcgatctcaagttggggtggtggtggcgaacaagctaataagttgggctgtgtcggcagccgcattggtgagattcggccttgagagacttgaggtagagtgctcagtttagtaattttgataaatacatctgggcgtttcgttttttgagcaaaatcgggcgtctggtattttacctccggtagggtgtatccctctacaaaacaaatttggtctgcaatagtaaatgtgcggcaattctgcggcagaattgcgcgggttacgctgtgccgaaggctacacgaacaggagcgtgctctgtgaagcaatcgctgtcactgcgattatgcactaccgtctgtagtttgaccccacgctctgtaaaatgaccccacgctctgtaaaatgaccccacgctcagtgaaatgaccatattcctctgtgattagaacgctctctcgccaagagactcctcacagactttcagtaagagcatcgtcatcggagggccttaaagtagtggtacataagtgcacgacgccccttcgtctcgcggtatcacagcggtatgagcacgtaggatcgcctttggaactctgccgtggcgaccttaaggcgattgcgcagcaacagcgagtcactgccagcgatatcagtgcttaagggcagcttgccgtacgtacaaccgccgcccagcagcccattcatccaatatcgcacatgagagtgttgttgcctcagcaaagggcttgtgttcggcgggaacgtctattaataactgcaagatttagatgcgatgacgaattgttgcattgctgccaaactgacactgctacgtgtacacgtcgtgtactacacgagttgatgcagcgtaggagctgctggcaattttgatgccgcgcaggaaggcgtgctgggcgatggcagacatgctgcatatccgaagctcggtagctagattgagtgcacggctatcagctgatcactctaagtgcaatatgacacgtattcgagtgacctgcctagctgtaagcttctgccatttatatagcacctttaccatatatgtagtaaaaagatctagctatctactacataccgtaataatcatatgcaccgaaccagccagagaaactactgcgatggttttcaatacctgctgggggacagaatagctgccttacttgatcgcagtgcggcattactagcacagccatacaccaaaacaattgttgctcttaatcaaaactgcatgcacaggtagcaagggagccaacctgaccgaggttgcgctttgttgcaagttgttgcgaacctagctcgagtcagcaacgaatgctgctcattcgtgagcaaataaggttcgacgcagcgttgtgctttcggatggttgccccagcgtaaaacctaagcacttcaaaacacacaacggtgacaagtagcgctgataagcttaggctgatgctttgaggatgtcgtcaaatgtacagtttactgtacgtaagaggtcagcccaccagcaactcgactcgagctgctcagctagtttattgaatatgatgggtacgaagcctttgaacgagttagggttacaaattagaacctctcaaaattggaaaatacagacgatcatctttgtagtgatagcctccactttttatcactatgcagaggcatcactatctagatctgtaccatattggcggtacattatcgttcaaggtactagggtagtgataagtggtgagcttgtaatgcactcgatacgtggtcaaagcgctacatacaagttgttgttgcgctgggcattataatatctactagtatggcagcatcctcacggcgatttgtcgcctgggttgctaagggggcaatgctacaaaatattatttgaataactgcagcaccgccccccattcagttttttttttaccaataataagtatacatttaatccaagtatactaccgtacctcgcagaaagaatggttaaccatttcaaggggcaattcttttgaaattgaaacgtagttttagccaatcaagacgcatataactgcaaaatattaccaagaagaaagtagttttgaagaaattgagagctttttaacggtaatttgagtgtcaaatgagaaagaccgaaagtattctttgtgtgttgaggtacggtatttggaaaacagaaacatacatttttagcgttgttttttaaattgtgatgatgtggaaaaaaactaagtcttatgtagatgagttagttattcttcgatcctaacatatatgtcgtttggacagcacttataacatgctaggtaccagagtgagcagtcggtcgtgacactacgtattttgggtgtgaactttaggatacttagtgatatatggtgcttaccagggaactctatacgccgggcggtcaggctccatataaatgttattgtggtttcatttcgatgcatatgattttggggggttaaccctttagttaagatgtcctcatctagaaacctcatctagaatctataggtgtgatacgatatatcgcaacgaaggaaaggctaatgcacagtcagcaagattcccatgacttaaataattgttaggagcgttatagtacttgttggactgtctaagattgcagagatctcactggtgaattgaggttacactgtatagttcgtaacgcaacttctagatgctaaaagttcagaccatctacagccaggtttagcactattattcacaattaccagccgcattgcgtttggctgtgcgccccttcggcgcccccgctgttcgcttcgctcacgccatagagatagaacattctgattcgtgttagtatgccaaaccacgtgagctctgctatgcaaattgagaactgagattgtcctggcatcctactagctggctagcgactactactaagctacgagtgaacccaatgaacccatgaggcagtggctgctaacgatcttcggcgaggacaggcaggttggcgtcacggttgcgtgggagttatcattctccctcatgccaggaatggaacaaatgcaggatcagcaggggaaaatgtgacggatgttgacacggtactccgtcgatccggtgtcgagacggacgttgccattgtcgaacacctccttgatgatgaatggccccttagagacaggatcagttttcttgagaccgtgagcagggattcgcagtataacttggtccccgacattgtagaagtgctgaattcttttcatgtttttgcgctcattttcttgtaggatggccatgaagcgctgcttggagagaaatccccagttggcaaaattaagctcgcaagtgatcatatcttcaccgaacagcaattgtgcgggcgaagctcggaggaccgagtgataactggcccggatggtgtatgcagcgtagtccaacgccacatcgagttggtcatgtagatcaagtctcacccgcagaatattcacgttcgcatataccattagcctgggggttcttcgacgtgatcggcttgtccttaattgccatgaacgcgagtagcaactgaaactcatcgtccgtaaattcagggcccaggtcatgcatgacacatttaaggcgagggaaccggcagaaccaggcacgctcgaagctgattgcagtagtttttgaagtcttgcctggctgcatgatcacctccaaccagcggaactgctgctcaatagccgtcaagcaatagtgctctccctcaaatggcccgaccaagtcgacatgcacaacatcgaatgggctgtcgttgttggtggcaggagtcggtggaattcgaccgtacttttactttccaccatggagcttagcacgtttgcaggcaatacacttcttgacgaacgcgctcacatctttctccatgttggaccaccaaaacgttgacatggtgcggaactgttttttaccgcccggatacagcaagttgtcgtggtagagctcgattaaatcctggcgcagggactcagggaccatgacgcgcttccgatattgaagtagaacgttccgagcgcggggcgaagcgcgtaatccggatctgcaccgttctgcttcagtcgctcgatgatcgacttgcacgtggagtcctcgagctggtgtttcttcatcaccgtgccgtcgataggtagagcttcatcttcgatagcgtacagctcgtcttcggtcacctgcttaacgtgatcttactgaagacgagagaaagcgtcagcaccaacgttttgagctcctggcacctactccacagtcagacgatattcttcgagcagcaacttccagcgcttaacgcgaagggagttttcgcgcgggtacagcaggttttttgggatccgtatgcagcaccataggaaaccccagtagcattgtacgatactctttgaggatttcgacgacagaaagcagctcccattccattgtggtgtacttccgctgggtctccgtcatggccctcgagaagcacgccagaatgcgtttgccctgcacaatgacgcctccaatttggcgcccgcttgcatctgcaaatacgtggaacctgcgacgataatctggaaacgcgagccacacgttgcgcgccagaacagctttcacagcttgaaaatctgccgaatactctggagtccaggcaaaagggacgttcttcgaggttagacgtggttaaagcagacttattggggacaatcgcgcggtaataagcgatcatcccgaggaagcggcgcagttctttcttgcttcgcggttctgcgatctgcagtttcgcctccactttcttggcctgtggatgtatgccttccggtgtcagcgtgaatccgaggtaatcaacctgctcacggagaatgtggcatttcttcgcgttcagggtgacgtcgaactgtcgcaggcgctcgaacacaatgcgcagatgtcccaaatgatcctccggattctcggaaagatgagaatgtcgtccagatacacaatcacaaagggaagatcaccgtcgtggtacggcgtacggcttggtgtgcaccggcttataatcagcacggagaggcagaatgtaatcgtcgaggcggattcttccaagacgcccgttgtacaaatcgacgtactcctctagaagcttcaagtagcagtgctgtagcgcttgttctagaaattcaggaagcaaatccagaggtttcactgtagtctcctcaccggcgaaaaattcatcatccccagcgcaaacatcatcatcgtcaccactagctgagtcaggacaagccgcgataggcgctaacgggggggaactgctgcttgcgatgcaaaaaatcatctcgctgccgtcccaggtgacacgacccgttccgaaatcaatcacaagcccaagtgcggccatcaggtcatcatatcatcagctagcgacggcaaaatctcgaactgatggataataatcgagtcgcgcttgagctgcgggattcgaaagcggacaaccatggcgccctgactttgggtcgaccccttgaccaactcgaacgagacatcggtgttctccagggctgcaccttgctgctgcagtgtgtgcataaactccgagctgataatactgcgggagcgtccgctgcccaggagggcacggtagcgctccttgccactctccaacttgatcatcaccctcatctctggcggcttcggaccggtcttcgcttggagcccaacgcacaggtattcttcgtcacttgagtgcccgagatcttgactgcgttgttccacccgagtctgctagttttgctgtcggtttcgagcaggacgggagccgcgcagctggtcggcttggtggtgttcctcttggcgattgtttgcgcgaagcgagcggcagtcctgcgtgttgtaggtggtggtacgatggaaggtacagtacatgttgttgcttgagctgttgacgtggccgttcccgtgttgacttccgttgttgttgccttgtccacagccgcggtttccgccacgttgattctgctggcggttgttgttgctgctgttgttgctgcgccggttgccgttgttgtttctggttccagagtggcgtgagttgtcattgccgtccccacgctggttgtgggcacctgcgcggtgtaggtgacgctcgccttgctcgattcgctcgaagaagggtatgagcgcggtcaccgtagtgtagacttgcccgctggcatcgtacttgttttgccagtcgtaggggagaccgcgcttgtacaagcggcaaagagcgtcttcgcacatcggagacgtcccgttgaggcgagcgagcgtgttttcttggcgagcgagagcgcgaaacctcttgctatactcggcaagcgactcgtcgcggggcttgcgaatctcccagaggtcttcttgcagcttctcgctgtcatcgacgggaagcacgacgatggaggccttgcggagcgcggcggtgtattcctcgtccatccgcacgtcgtcgtcggagaaggcggcctcttcaaaggcatcgcggagatcgccttcgagtaggatagtagtgttgaggatcttgtcctcggccagccagggcttcagcttcgcaagctggttgaagttgtagacccactccaggaagtccttgggccctccgtcgataaacttggtcatcttcttcgtgacgacctcttcttcgattcctttgtccttgttagcggcgcgcactacgatcgagtacgtcacgtaccgctccttgtcgtccttcggcttcgacgcgaggcgactcatgttgcagtgttggccgacgggtgttccaggtcgatgcttgtttgaaaattttcaaagtgcaaaaccacgtgagctctgctatgcaaattgagaactgagattgtcctggcatcttgctagctggctagcgactacgagtgaacccaatgaacccatgaggcagtggctgctaacgatcttcggcgaggacaggcaggctgccgtcactgttgcgtgtgagttgtcaagtacaggcctcggctcgcaggaatgctcggcgctgggcccgcctccgcaaataccgcgcgaccctgcttcgcgggcaccccgcgcgggtttgctgtggctacgctacctcgcaaccgcttgcctccgttggtaggccgctaccgcggcagtaacacttttaccctgttcatctgcggtgtagttgccaatgcattgaaatgggtcctagacgaggtcgtacatattaactaaactcaaatggctgcatcagtacgtcagaatagtgtaaccaaagagtttttacagacttcttacggcatgcccattctggttggtctgatttgacggcgtaattcattaaatcagacttgccgtcccagcaaatcagggtatgcgtatgtggagagccgggtgcctatcatcgatcatcgaccacaaagcctacctaacagcccaataatgcatgcaatcacatggtgcgtcatacgaagggtcgacacctgggttacataaaaatttgccctcattttaatgattgttagatcgctgatgaaatgtatctttcacggtttactgttgtaaagggccgtcagttgaccattatgttcgtaaaaagaggttgttttcgctcgaatcgcctccggacggggaataataatggtatcccctaatccgttttctatgtgcctatttatggctgtaaaaaggtgtaaggtgtagtaaatcagcgtaagaagtatagtgtgtgtttcattataggggggctttgccccaaatactatggtgtgagggtggtgagacactgcgcactattcagatggaactgggaggactgcacaggtagctacaacgcgaaatctagtctagcgcccaggccaaaacgataaatgcacgtcccagaatcacatcatgcaaaactttgaagtttattaaaataatatgtccgcgaactaggagaatccaagtccattcaaggtcgcaagcgacccatgttgtggttaaacttccggacatgcttacgaattgggcattatcatagttaacggtctcttgatagtgataaacccaatctcgtatcactaaggcctagttctaaccgcgcgctatggtgccatgccatgccatagggctaggtaccgattttgcatggcaatccgtttccgaatgaaatggcctgcgccatggcaagatgaactggtgatatacaagcacactttagcaccccgtcggccaaaagtgggttacatgggtttctaataggtgtatgaactagtatataccagcagagtgaagtctgacgcccgtcgcgagcaatttccccattatggcacatggcacgaccaattgccatggcaccaaagcgtgccatgcatggcactttcatggcaccagtgacctaaacccgaggagctctcggccaatgaaaaatgacatggcatggcatggcacggatggcacgcgattagaactaggcctaagcactatccggaggttggaggatgttttgacttaaatttgtatgtcgtaggtcatcgggagagcctccattagtgctaaccagagggtatccctattctggatatcactccaaagaggattgtctgtacatgtaatactgtaccacaataccgcaaaaactctgatagatttggcacccctccctaaagcagttttgaaaggtgccaaaaaaatttagaaattgaaggtgctcactgattggccaatcgaattgacgtattggggtggttggacgtgagtgcatttcaaaacagggtagagtcgtttggcgggagattctggtaccattggcaaaatgcctccgcaccgcatcaagctagcccataccatcgaattcaagatcaagacagtggaggattttacttcgtttggtgcatctaaggtggcatttcccacgagttgcgaattttctcgctctccactgcagtactggtcgaaaagtatgataccgtgaagatagctgtcgaagtaaacaaacgtgctaagaagctgactgttggtggtagtggtcgcatctcctcctcatcatgtgtagaggaagaactccgaggctggatcaaaggcgagcggcgtgaagagaggtctaaactgtctacgttccggctgtacctcagtggtccaccccttgacgacgtcaatggcgtgggcgtcatgtcgccgtttaaaagtagccttcaaagccgctttgcagcgctctatttgcgccagcaccacctcagcaagcttggcaacaccggtacggcatttttcagcgctcgatgcacgctctagagactaccccagctgtgaatatgcaagttcgtttgcggagacctgtccgttcttttctttttagcagctctagcgcggttcgagacacacaccgacgagtgaactgtagtgtatgtcgaggttttcaaacagcagttgtaagtcaatagagtcttgtaggtagtgaagagcaggggaggagacaggaaggcacgtgtgttgagtgaggcaaattccgaagtgattcattgtctcttagccaacctgcacccaacctacatcacgcacctctcagtgggtacgaggaggaaagccccaggcacaaacaccccctttgacgtaccgaacccatcagtctctgcatcctggcgggtggtacgtcgatcccagtcggtatgactggtcttgacaagaacgagagtttgtgagagcgcaagtcgaaacctcatactcccccgtaactctcgtctccttgtccaaatttgtaacctgacaggaacgtgagttcagagccttcggctcatactcccccggaacttacgtttccgtgtcaggcttcatgtcgtcgtcgccgcccgcaaggttatcggcgactgctgtgccgacgtcttcaacaccaagtagcccccgtagtttctcaaattgttgcgccttggtaaacatgtctgctatgttatcggatgttgaagtgtagtcaatcaccagcttctttctttcgacgagctccgccagctttctgctctttttcgcgtagcgtttcacgccgtcaaaattgccagcgtccgagcacaccttgatagtgctctggttatccattaggagtctcgtaatgtcgaggtcgaacttgagtaatatcagcagttttcgcgcccacagcaaatcttcgacacacatactggcagcaacgagctcggacttgcatgtgtcatcagtaacacttctctgcatcttgctgcggaatccaacactgaagccgttgagctgaaggacatacctagtcaccgaccttgaagtttctgggctgttagcgtgatcagcatcgctgaatgcctgcagctgcaattctctgcgtggtgcagcatcacggaggcgataaaccagtccgaatgttcgtgtggccttcagatactgcaggacgcgtttagccgcggcatagttctctttcgagtagctactggagtatctgctgtgtaatgggtcccagttacataagtaggtagattgacagtacataaagtagttaagtcagtacacggttagcgtgtactcacggtcatcgtcattggctgaattgggggagccagccccatttcagccaatcaggcgttgacctgcatttgagtggctcacatgagaccaggggtagccgccctggtcctaacataaaacagagttgattttacccaagactgactgcttggtctcattaaatccgagttttaactaagcttcctcaccgctacgtgtaagctacagtgcctacagtaattagtctgggctcaaaattagtctggcttcaaaattagtctgggccagactaattcgtgtcgagcaaaaattgacgtcttcattattagtctggctaaaaatgttcataattagtctgacgtggtgaccacgattctagtccacccccacctactttaaggcaccgcttgctgaaaaactcctttgacagcagccaatttactagatctcgtacaatatctgcaagatataatacttctctgtctcacgaaagtatgatgatttcgaaattgtgctctatctttgcttctacttaagaattttggccatgtgaggccttatcatgaagcttagaggcaggcgctaacgccaaatttttgctgcctattatctgtgagaactgaaggaggaacaacgctttatctgccagcaattttagtccttcgtatgtttgtttcataattctataaaaaatttgcaataattcatcgcaatttcaggatgagttcctattgccaatgttaacttggtggaccaattacagcttgtggaaaagcctgataagcgagatatctcgctataaaattaatgagctttgtctaatcatgtgtgctatcattggacaaaagtcaaattttgccctagccacgtcaaatgaccaatgatatcgttgtgtggtacacaaaaaacctaactacccatactttcgtgggacagagaagtagatacctgggtatccaacccatgtatcagccttctctaaccattagagaagcaccatctgcgacgatttagtcttgatttctcttcaaagccacgataatatatatatatagctacactataaaaatactaaaacaaatacgtataaacacatcatttcacaaaaataatggttttcatactggaaaacggacatttttagttattcataattagtccgtcactgttgcggccagactaaaaattgtgagcgatgaaaaatctggtattcagatttagtctgggccagactaattacttaaggtactgtagtaacggacacacacctggcccgttacacctggtagcactttgtagtccttccaacgaccaaaaccaagatgagccaagtcctgacgtccggaccttcatgggcaaccctggagcacggtgccttcccccatctcacgcgcattgagtgggaagctctccatcgcctcgcggcgatgtccggagaggctgttgtcacttcgctgctgagctcagcgatgccggaacaacagcgccaagctgcccaagaatccatggaacgcgagctcgccgacgcgaatcggcgggtcacaactccctcgcgctcctccaggaacgatgtcgtcaaactggagacgtccacctactctggcgtgggcgacgatcggcttccactgaaccgctggttccgtgagatcgacatcgctatcgcctcgcgcattatcgaagcgtcggcggccaaggtcaacttcctaccctcccggttgtccgggaaggccaaggagtgggtcctcggcaagctcgtcgtcgaccagaacgcgtcccctactctggagtcgctccagagtgatctccggctcgcgttcgagccgccccaagacgagtcgcgcgttcgcggagagttctccgctctcaagcaaggcaagatgtccatgcgcgactatgcccagaagacacgacaccttgcgtcgtgcattgtcacccaccccattgacatggcatctcaggtgcatgtctttgtgtttgggatgcgcgaaggcatgacacggtactgtctcacgcaagccgaaccctcctcgctcgaggaggcatttgctctcgcgctccgcgaggactacgtggtggcggaatcgtacgcgcgcgctatgccggacgtttctcgggtgtccgcgcccgagcccatggagatcgacgcaattgaggcgtcgggtgatcgacggcgctcggcttatggtgggggaggaggtcggagcgctcgtcctctgacctgcttccgctgccggaagattggacatcgcgcagcagagtgccgcgcgccagctccggttctcgcgcacgtcgatgtcgacgctagcccggccgctcaaccaaaaaccggccggggccagtaggtgcggggccccctactggttggaacgaaggtccgggtcctccggtggcaacccggccttctagccctcccgtgctctatgcacgtttaatgccaccactacgagtggcgactcgaggctgatcatcgtcagcctccatgtcgccggcgcccgacgtccactgcgcgcactccttgactcaggagccacgaacaacttcttccgcgcgtcgtatctgtcggtgctccctgcgagcgttcgcgtccggaagggtccgggcgaggtggaggtcaagcttgcggatggcaaggcccatcgcatcgcccgacgcgaggtgtcgctgccgtacacgttcgacggcttccgcagcaacgatgacttcctggtgattgagatgaattacgcattcgactgcattctgggtatcccgtggcttgcacggtatcagccagagattgactggctggctcggtcggtcaagcgtcgacgcggcttcgacgtacgtgaagtgttcacgcacctcttggtggctccaagagactgacctcacgttaccgtcgtggacaagacagccacgacgcaagttgtgcacagagcgagcgatggccctctctgcatggcctgtgccgtgctgttgaatgatgaggatgtccggatgacatcgcgtggtcgcgatgacggacgcgtggtcgagcgaggtgcgctcccacacaatgagaacaagtcgagcgtgggttcccgtcgcacaatcagacggcggtcgagcgtgggttcccgtcacaagttgaacaggcggtccagcatgagtcgctcccgcacagcgatgttgcggctgagagcgtgatgcagccgcgtaccgccggtgtgatcgagcgtggcctctaacacctagaggggggtgaatcatcgtcgagcgagagcgatgcgccttcttcgagcacccgctcgaagcgaaagaagaagtccaagcgacgccgcctgaagacccgtcgagaaccgtccgcgactgagaacccaccgaaggagtcggtgtgcgctctcgagtacgtggagggcgctccacgacgatcgcgcgtcatcgaagtcgcgagtccgcctcgcgatgccaacacaatcacgcgtctcccaggactctcctggaagaacctcctgcgagacctgaaggcaggcgagatcgagcaagtgtgtatgatcacgaggcggtcccggtggatacgctgcacgcggtcaaggtcgaggatgcgccgtcgaggcccaagcacgccgagcccaagtcagcgcgcgaggagcgcttcgcggcgcaatcctgggaagctctacgtgagtccggtaaccccgtgtacgaaactgcccgcgagtacgcggacatcttccccgacaagatccccgctgagctcccggcggaccgaggcgtgcgccgacattgacctcgcgcctgggacaaagtactgcgtgacgcggcagtggccacttccacgtgaccaagtgaaggccatcaacgacttcttcgagagccgccgccgggcaggtcacgtgcgcgaaagcatctcgccacactccaacccgaccttttgcgtcaagaaggcaacgggcgggtggcgccatacccgcgcagacgccaatcccgcgcaaggacatggtgctggactctatggcgggaagcgtgatctacagcgccatcgatctgaccgatgggttctaccagatactcatgcgagagtgtgacatacctctcacagcggtaagcactccgagcggcatgctctgggagtggctggtgatgccccaaggtctgaagaacgcgccggccacgtttaaccgcttggtctcccatgtgctgcgcccgctccgtgacttcgcacctagctacttcgatgatatcttcgtgcacagtcgcgccgaaggtgacctcagtgctgtcgaagtccacctgaagcacctgcggcaagtcttccaggtgatgaggaagaacaatctctacgccaacttgaagaagtgcgtgttctgtgcaccggagatcccggtgttgggctgctacgtgagcaaggacggagtccgcgccgaccctgagaaggttgagtcaatctgctcttggccgaccccccacgtcccacggagcttcgtcagtggctgggcatggcgaactacttgcacaagtacaccaaggactacgcgaagttaatccagccactgtcgtcgctgctgaagaaggacaccacgtggtcgtggcgagaagagcaccaagccgcatttgactcggtgaagaggagtctgtcatccgcccctgttttgatgctcgcggacgatgcgaagtcattcgacgtcgtctgcgacgcgagcgactttgccatcgggtgtgccctgatgcagttcgacgacgagggtcgtgagcgggtgatgagctaccagtcccgccagctcaagccggcggagaggaactacccagagcacgacaaggagctcctcgccatgcgctacgcattggtcaagttcagggtctacctgctcggagagcagacgtttgcggtctacaccgaccatgcatcgctgcggactgcgatgaaatccccgcatttgtcccagcgcatggcccgctggctgtctttcttctccgagtacaacttcgtggtgcactacaagcctggcaagaacaatattctcgccgacgcgctgtctcggcgtccagactacgacccacgcgaaggcctcgagcgccaggcagctgacgaaggtgatgaagacgcgtgtgcgacgtgtgtgacgtcggggttgaacctgacgagcgtcgtccccaagatgccgcttcgggacgagatcgccgcagcgtacgagcgtgacgcgcggtacgccagtatcctggcccacctccgctctccaagcgaagcgacattgaaggctctgtcacgctcgacccgcagccacgtcgagcgatattggcttgatggctccctgctgacgtacaccatcgaccgattcgatgccccgagagtggtggtgccgaatgacgaagaccttcgcggcggtggcgcgagacttcttctggccccacttgtacaagtgggtgcgcaagtgggtgcgcacttgcgagatctgccagcgagtaaagcccccgccgttatcgaaggctccgatgcgtccccttccggtccccacggaagcctggcgctccgtctcgatggacttcgtcttcggtcttccacccgactcaaacgggcgcacgggagtcctcgttttcgtcgacaggttcagcaagatggtgcatctcgttcccgtggctgccacggttactgcggaagagtccgcagcccacttcgtcgacgccgtcttccgccttcatggtctgcccgattccatcgtctcggatcgggatctgaggttcacgtccgcgttttggacggagctgttcaagttgcttgaaacgaagccggtgatgtccaccgcggctcacccggagacggatggacacaccgaacgcgtcaaccgcgtcgtcgaagacgtgctccgcagctacgctacgtcgttcccgagctggagcgctttcctgcccctgaccgagttcgctctgaacaacgccgagcactcgtctacgggcatgactccgttcttcgtgaactccgcgcgccacccgcgcgtacccgccatgcttgccgtaggccaacccacggaggctcgtgtctctacgtttggtgggggaggagctgccgctgaagactcaccgccgaccaagacgccggcagagtcgtcgccggtcgaatcaccggcgccgccacgcttaccagtgaccgaatcaagcgcgaatgcagtgacacgatcccaagtgaagaaggccctggctgcaccgcgcagtgcggtgacgccgctcgcagactggacggagcgcactctgatcgatcccgctggcgctccagcgacaaagcagcaaccggctattcccgctaactacgcaccgaagtccttggcgggtcccgcagaccactccgcggtctccgagtttgtgcatcagcgtcaggcaatcacacgtttcgtgcgggacgcaatgcaagctgcagtggacaagcagaaggaaaatgcagacaaccgtgggcgcaaaaacaaaaattcatttcgcatgggtgaccgtgtgttactgtctaccgaaggcatccgctccccgccatgaccaacctcggcgccaacaagcactctccacgcttcattggccccttcaaggtcttgaaggccttcggcgacgcgtacacgctggacatcccgacctcgctgcgtcttcacccgacgttttacgacgggtgcctcaagcgttaccaccctgctgaggtcccgagctctgaccaccaggagcccccggtggaacatgcatcggtcgccccgcccgacgtgcctcgcgcgccatctatccgtccgagccaggcgcccgctcccgcggacgagttcccgtctgcaccgttccatagacgctcctctccaagccccgcaggcgcgtcaacaactcctggttcgactgtcgaagctgcgtcgccacttgctccgcacgccatacacgcgcgtccgctcgctcagcttccgcctgagcgtcccaagactgattcacagcagccacgatgtcttccgcgcccgctccatccggcgccgtaccgccgtgaagggccaccaccgattgttgactcggcgggcgagattcgctggattgtcgagcggcttgtggcacacgaagatccccctgctgcacgaggccgcgtggtcttgccagccacgcagtgccggctgcgcgacgttaccgagtacgctggcttgggtttccacctgacgaggacacgtgggagacgcgtgcagctcttcttcgggatgcccccgatgttgttcgtcactatgaggcgaaggtcgctgctgctgaagagaccacggatctccccgcggaagctgaagccttaagtgagcatgatgatggaagtggacccccaccggaagctcgcggtggcgttcaccgcgaagactaagaagaaaatccgacgacgaccgccggactcgaaccggtgacctctgccttggtggcgcagcgttcgacccctgcgctagctgggcttcgagtccccttgacgacgctcgcgacctggtcaagcttggagcgactgcgcgtggcaagtggcaagaaggattcgcgtggggattgaacccacacgtcacagctcagctcggtgagcgcttgcccactacgccgcaccaccaatgatcgccggtgtcgaaggtgtccaagctggtctcgctgccacgtcggttcgggtcgacgattacgcgactcttcgtcgggagttacttcgaagggtcgtctcgaagagtcgcgccacgctgatcgccatcctgtgtctcgacactcgccgggtctccgctccgtgcgcatcacagttgcgcttgtcgtcaagcgttggtgtcgctccccatgctgcgtcattgccacgtccgccgtcccttcgggtgtccgtggatgtccgcagccacttgggcactgcgcattgcatcggcgtgtgcgccgacgagatgtcttggtgtgtgcacacttgctgcacctgcgtcgtcctgtgtcgctcggtagcgcgagcgccgttcctccgccgcctcggtcgtccatggtgttcttcgggtgttctttcggaaatgtgtcttttgcgcttacgcaacgtaagcgcaactttgagagggggtgatgtaatgggccccagttacataagtaggtagattgacagtacataaagtagttaagtcagtacacggttagcgtgtactcacggtcatcgtcattggctgaattgggggagccagccccatttcagccaatcaggcgttgacctgcatttgagtggctcacatgagaccaggggtagccgccctggtcctaacataaaacagagttgattttacccaagactgactgcttggtctcattaaatccgagttttaactaagcttcctcaccgctacgtgtaagctagtaacggacacacacctggcccgttacatgctgaggctgcggactgcatttgccaaatccggccgtgtacacgtcactaaatactgcagtgcaccgaccaacgcttgataagggatcgatgggtcattcaacttggccgggtccttttcaattggcaatacttcctcgttcatgatctgcggcgagcgaactgttcgggcctccgtcatctgaaaacgcctcagcaacttgtcaatatatgccgtttgcgaaaggcacagcacgacgccaggctgatagtgaacttccatgcccaagaagtggtgaacacggcccaggtccttaatagagaattctgcctggagatcagcaatcagcttgtcgatgtcgctcgtttgtccgatgatcagcatatcgtcatcgtaaactgcaaccaggagaatccgtccgttgacctgcttgtagtaaagtccaacatcgaacgtgctgcgtttgaatccgagtttcaggaggaacgcatgcagggtttgataccagagacgcgcagcttgcttgaggccgtaaagacctttctgcaataggcacacacggcccgtgtcgtcgtcaaaataggcaggctgttccatgtagatgacaacaccgcgcatccagctattcaagaaagccgtgtcaaaatcaacatgacgagtctctagcagtagaatcagcgcgatcatcagcaacaacagtatggtgatcagccagacaaccggtgagtatgtgtcccaatacgccaatccatagcgctgcttaaaatcgtggatcaccaaccgggctttgtatcggatgatattcccatgttcatctcgcttcagagagaccacccatcgcgatgtaagcactttgaccagcttgcctggtgtcgacgacggtctctccaccaatttccaagtctggttccgaatcaaagcatcaaattctgcgttgagagtctgcaaccactgcgctctttgaggtgatctcagcgcttcttctttaacgacaggttccgccccaaccatgagctgagagtcactcagcctcacatttggccgtcgaatccgggttgaaggggcccttgttggcgctggtggagtcgtattaccgcgacgtggacgacgtgtcagccgtcgtcctgacgagggagatcgagctgacccatgtgctggtaccgcaccatgtccagtcgctcggttagtgtgggtcacctccacatccgactcgtcactgctggacgatgtcgctcccccggaacctggcatgccttcaccggctgccaatccttcatgacttgtagtcactgaactcggaaggttgcgcgcaatctcgcgtttggcaccttcacgaacagcatcttcggcaacatattcaacgggaaaacgtcaaaaggtgtatgaatttgaaacgttttgtcaaaagcggttaacttgtgtcattagatgtatgctaggttgtcggtatgacagtatgtgtatgtggttccaagcgcacaaaggtgcatgataaagctgcatcagcaacgaatgcggtgactggtgtgtgggcttagatccaaatccataaaacccggggttaggaaggcttctacctgatgcaactagcctggttcgtggtgtccatgactttgatagcgaattgtacggctgagggactacaatgaacgtcgttatccattgtagccaggcctcagcgttgccacagttctacaatacctactctctcccccggttgggggctctcactacagctccttcacctccgaaattcagatgcaaaacctacctagtatagtcatgctatatacgcttgcggtttgcgttggcagttccttgtagctacaatagcgaagttgtcgagtacagttgctctatatgctattattagttgaccgtgttcgctacgagcgcgtcgttaataagttactgtgcttggaagctcgatcctgggtctgtatgacccgacctcggccgaaataccgcggcaaccaaaacgtgtgtcagtacgtgtatgatgagacatgacgcgacgtgacgcccacgaccactacaccgattgacaaacgttttcccaacgcatacaccttttgacgttttcccattttcaaccggtagtggcacgaatgggatctgctcgtactggttgtgctggtcatgcagaagcgcgttcaaatacttcttgctcgctgtgatattctcccgaaaaataacgtcatgtgcctcgacgattgctcatgttcgtaagtgcaggaacctgtatccaggtgacaggcgtgcgaatccgagtagcagtccgggctccgacttagggctaagcttggtacgtcgcttctccttcggcacatgaatgaaaccaacagatccacagacacgaatcttgtgaagatcaggtttctgtcccagcagcttttccgatggcgttctgctattcaaagcgcgggtggcactcatgttgtcaatgtccacgatatactgcaagacctccggccatagctggtcaggtagattcgccgcgtgcatcgccgcccgcaccttgtttacgagcacaccgttgagcttttcgaccaaagcgttttcctcaggcgtgtagggatgggttggcacgagtcgaatgccatggagagcaaggaaggtcttcaactccgtgttcaggaactcaccgccacggtcgctggaaaacgttttaatgcgatggccttgcgcgattcgttcagacatcagacgaagtgtgtttccgttggcatcgtctttggacttgaggggaaaacaccattcgtagcgagagccttcgtcctgaatcaactggaagtagcggttgccggtcagaccgggcaaatacttgcccatatcgcaaacatccgacatgagcctctcataattcaccgtggtccgcttgtgtctagcgctggtcttgtatgacatcctcttcttctttgcagacagacagctcagacacacaaacttcttcttaaaccagtgtgcaggaatgtccatgccggagaccacgcccttgtccatcatgcggatacattgagatgccccagacgctcatgccatcgcatcagagggctggcatctgcgtcgatcgccgccattatcgccgcttcgccaacgataggagggtccacagtgtacggccaataatgatcaccctcttcgacgaattccagtcgttcttgcccgcgagctagccaaaatgtgcgcggagtcacccccgggttcgagaaggaaggcacccagcctaatttctccattcgtcctaaacttaaaaggttcacagatccaccaggcgaatattcgacatcttccagctgcagtcgtatgctctccccacggacgtgcgagttagctgtaaagaccgcaaccgcactgctcatcacgtctttagtaacagccccggtccaaactttgaagacagccttggacttcttattgctggaaaacaggtcgcggttgatacaaacgtgggtcgtgctcccgcaatccagcatccacttgctggaatcgatcgaatgtttctgctttgccaccatgccgagaaccgacatgtttccatcatcgtcgctgctctcactgctactgtcattgcgccctggagtggttgcgtccgacaagccactgtttagccacatcatgtgttgaatcgcgcccgacttctcgttcccggtagtctccttcttgatcacttgcttcgccttggtggcgcctcctttgtttcccttcaggcctggttgagccttcttcgacgatgtcttgcgatgccagcaatctcccttgaaatggccaggcttcccgcagtggaaacacttccgcttcttcgtgctggtgcgccagccgttgaattgaacctgctgctgtcgtgtctgccccaacatattcatgacagcgcctccattgtgtcgtgccgcaacttgttgctccatccggtcgcgttcatctcgtgagcgcagcgcgttggtcacttgagtcagcgtggggggtcaccttggcgggtaggcaaatcaaattgttcaacaagttctcgatgagtcaacgaaacccccatgagcaacaagcgagccatttcttcatccgaaatagcgtgctcagagctcatgctctggagttgttgacgcaagcgagtcatgccaacaagatagtcagccatagactgcccttccgtgtgcgtgttctggtacagttgccgtcgaagtaagacagcatacgaaaactcgtgctgcgttttatccgctaccagcgaattccacatggtgagccgtagccatctcacaaatcttagctgcatcgtcgttgtgggtgccgcgaagaccgcgaagaatcgtagcccgagccacgcggtcccgttggtcaaactggcgttgcaaatcagcgtcggtagcatggcgttgctctgctccggtaaccacatcccaggcttcgcggtcacccaggtaaagctccaattcggtacgaaaaagctcaaacgtgccttcaaaacgcggggggttactgctcccacgaactggattggtgaccgctagggccggtgccgggggctgcacgttttggacgttgttgccaccgttgttcgccatcctctctcttccgtcactctctctttagtcttgttctttgccgtagttgtttacttatcttctgccgtgttgagctttgggctcataacctagcagctcaagcgctccgagacacacaccgacgagtgaactgtagtgtatgtcgaggttttcaaacagcagttgtaagtcaatagagtcttgtaggtagtgaagagcaggggaggagacaggaagacacgtgtgttgagtgaggcaaattccgaagtgattcattgtctcttagccaaacctacatcacgcacctctcagtgggtacgaggaggaaagccccaggcacaaacaccccctttgacgtaccgaacccatcagtctctgcatcctggcgggtggtacgtcgatcccagtcggtatgactggtcttgacaagaacgagagtttgtgagagcgcaagtcgaaacctcatattttgggcctgcgccaagcgcttccccgcgagctcttctcctgttgttgtggtctcagccacagaagtagttatggaagcacataattagtgtgacccacattgttacaaaacacggttgaaaagaaatgcacgctgattggtcagcccttaatacaggcgaggtcacccgtgccaaatctttcagggtgccaaatcgatcagacttttgcggtaccatggttgaacaacacattttgactgtaattactgtgatcaaaggggttatgccctttttaacgcattccccaccgatgtgactggctaacaagatttgcacattgtccagttttccagcttgggaattttgtgctaggaaacaacgggtaggaaaaaggcaattttaccttctccttggcccagggtcacggactttgtggttcgtgtgttgctggttagtatattgctgcggccaagtcggtagatgtgcgcgtgtaccgggcacgctgtggggctataagaggcactgtggggctataaggagcactgcggcgcagacctattttcttgctaagctcttcgccacatacacagatatgcgtaaataaaaattgcaataaaactattgataaaattggggtcaacaattacaattagaaaattggctgcaaagattttattgtattgtacaagacagttgacttgataactgtatgtgcgtgggtagccaattaaatgatccatacagacccctatacaaaccacaagaatacaattcaatgcctacattgtacaattaaaattgtagcgtgacggcaaatctcaatcaatttttcagtgtaaattgacgcaacgctgcaggtaatttagtacgaaatgaaattccagtcagcagtcttgtttacttttacacttccaaaaaaatttcgctccttcagaagtctttgaagcctcaataaatgcgatttcgatgtttcctgaacgttacctgtaactgggaatatattcgtgacgaattaaagtttgtgaggctggtaaaccagcaagctggcccaggataaaacgtcggatgactctatccactggaactgactcgcccgctggaacgagcaatccactgttttgtgttgtagaagtggtgcgcgattttgctgtccagcggattgctattttaaactgtcaaatattgtaaacagagcgtgcatcagaagcaaacgtatattgagttgtagaggggacaaactcgtgtgccctgtttactgtaggacttggctcaaactccctgtgagagtgtcgacctggatgacgggtttccttcctaccacagtggcgacagcttccattcgataactccgccgccgtgtcacgacacccctcttcgctgtcttcggcattgccatcgcctccgcaagcggtatgccccgggcagccacagagacgcgttgagaatggagtccacccactctctaacgaaaaatgtctttgcaaaggcgccatctgttcaatccgctggatcaatccgctgtctgcccgaattcgggcggatgaaatccgctggaatatgctcgaatttccgctagaattgcatgcagtacgcgccagcggatcggccattccgctggaattggccccattccgctggaactctgatgtgcagtacgcaccgctgacctttagaagcctgtccgcggagcatgtacgttcgctgtgctcatgttgcttaggccctggtccacgtggagaacttgttctacaataaacagcgggattacgctttctgctaagccttattttgtgcttgtgatttcgagaacgtgtgctccgcttgtccaagtaaattatgaaaaggtttgaatcgaccgaccgctgtgcgctgctacgctgattacctgccagatgctgcggctgcgaagcaggcgcagtagctggcagttagcatcaactaacagtgcttcttgactcgacatttgtactaagcttagatcaatatttgtgctgctaaaccgctatccacgtgcatctcctgcgcctgcttcgcaaccgcagcatctgcctgtcttcgactgctagaatcgttcatggcaggcttttcgaaagctgcagttctggcttactcccaacccttccacaggcagttcgcccactattggaccagccaccgaagaatatacacaagttgtattcgaacatcacctacatattggtacacgcgtccactttgcgtagagggttaacatggtatcatcggcatcactgagggttgcatttgaactgttttttttctaaaatatcggtctgataataacaaagcagagcttgcacgtctacgattaaatgaatacgaagtagacaaatggtctcccagccaaagcgcagcaaccttgttcgagcagaactgccaggaattaagctcaaataggaagccacagtaccacaaaaaaacgtgatgctccgctagtggtggcctgcttgcgtagccaaactgacgcgctctgggatggatgcgccccgcgtacagtgctgagtgccgcattatggaagagcccctctccaggacgcacgatgaggactctggttgctcgttgaagttgaacgcacatagctgagcgtgaacgtgatttacggcaggtacataggttaggaaccgtaggtgcatgcacaaattggatctaacttacgtcgcctgaaacctccatcctccagtacgcgactattacagcggatcctatcatgctgcgtagatttataggatcttttatttattgtttcttcagatactggcgtaataaggcttccatcgctctactgatgttcttgcgtaaagcttgctcgagcagactttgcgagatgcatccacatttgagtatgaactatgcatcatagatccattgaccatggatagccttccgaaaaaacttttcgactgccccaggagaaacagcgccggtctccagcaagaactcgacggcactggcaacgtgatggtcggccgctctctcaaatgccgcatcaactacagatggagaagcgtgtgcttcggtgtacaggtacttgagcacatcgacgcatccagtgtgtgctgcggcaacaaaaacttggttgaccttctccgatgtaatgcagccgtttccgtacaagaactccatcacgtcaactcgcccgccaacgacagcccccatgatagtgttagtagctgcgcttcgaatgtttggataattacgtcgtgcgtacggggcttcttgccgttcaagaacttcacagaatcgagacaaccatcacgagccgcggcaacgaacgcttgattggtaaaagtcgtcgagaccgtgtgtccatccaaagagaacaggtagtccatggcgttaatcctaccgttggttgccgccttcatgaacgctttttcaaaagaagtaatggtacagcctccgtgtgtctgtagaaactccatgatgtcgactttccctccaccgccagcatattcgaacgcctcgcaaagagaagacgcgtcgtatagtccgtccttgtggaatagttcgacaagttccagtggcccacgagcagccacaactaccttcacatcatcgagggagcaatcagcatatccgccgcatgcgtacaaatacttcccgatctccacctggccatgcatgatcgctttggcaagtgggctttcagaagcgtcacgatcacgttcaactcggagcagttgatacttgcacttctcgagtaagaactcgacgatctctaaatgcccgcgggaggctgcagtgcccattgcttcaaaaaggcttacatcccgacaaacctcgtacgcgtacttgagtactcgcatacttccgtgcctggcagcccatcgaagatgaccgaccatgtatgggtcgtcaacggactgataaatctccgcagcagcgtggtcccttcccaacttcagagccaagtcaagtccggcggagtagtcgcaatcatagccttccagaagatcgcgagtaattgcgaggtggccgccttcgatcgccttggccagcgagtcgccgcatccagtcctgaacttttcctcctttccttcctcgtcctcaggcgcccaccaggtatccacaaggttgaaaacttcccaaaatccatgcgttgctgcagttttgatgattgcacgcgccacgtcggccatcttgtgacggaggtggggtaggagcttccgcagccagtcgatgtcattagcggcggcagcctgcagagccgcagcttcggttgacatggcaaactcgtcgatgcgcttcataatctgcggttttgcttggatctcggcaggaagttgggcgcctttcaggtgtttgtactggcggtgggctttgtctgcgtctccttcggcccgagcccgcttcatcgtgctcgaaaatcgaaaaatgacgatagccatgcaaatcaaaatatcacggaagctgagcgtattgaggaattcgcacttgggccacggcggcactgcgtgtacgtaaagactttgactagagtcggcagtgtatcgtcaagtacatcttattacgagttatgaaatgcaaaacgtcctcgcagtcggtcagtggaatgctttcaggcagaatcgccaggaactcgttcccgatcacctggtagcacttctccagtggaagttctccgtatcaacgcaagttgctaccgccgctaactcttcagtatagtccacgatatactagattgtattatcgaggaaccccaataaatgtatctcgagttcgaatgcaataaggggatgttgatcactggatagacacacatccggatacggaggcaaactgccgggcctccactgaagagggtacactgtaacagtcgtacatatgctggtgcttcatgtaaccagcacagcgttcggcgatttaactgcgctgaatgacgggcatttgatggacgttggggatactagaactaaatgactcaaatggaacctcgcctagaaacgaaacgagttcgaatgcaatgaaaacaaacgcaaattcgatctcccattgatatcatcgatatcgagctcaagcagatgggtagacgcgtctaagctgccgatggcattttggttccttgcttgataaccagccttcctcacgtatgatgcttgtcgaaaatgacgaggcaaggtcaacaaacggagtagcctactgagcagtcgtgttgttcgaggcaagccggcgctggaaaagtaccacaaacttagcgaaagggatgaggtccacacggacgtagagatccacatgaccagcacccggcacccagtagagcttcttcggctcagccgcacccgcatacgcatctttgccaaactcgggagagtgagcctggtcaccagacacaaacagcaacggacgcgacgagatcgtgtcgatgtcgtcgaacgggtagaagttcatggacttcacattgctggagagggtcgggtgcgttgccacgttacgggaaaaccccggaggtgtgcactcgccgcacgacgcccgctagaagtcgtagaactcgcgctggatctcgtgtatgtctcccgcgagttcgtgcagtgtaccgaacctcgccaccggcggcctcaagcgagcattgttgcgtcgcagaagcgatggcggccttgcgttgctcgacactctgtgccttcctcaaatcgtcgcggtttacagcacccatgtcccgttgcaaccgccttgatgcgatggtcgatcttggacgcgctgatcgcaaaggagccactaccgcaaattccgagcgcgccgatacgctcagggtcgataaagtcctgcaacgtgagatagtcgacgacagcgctgaaagtctacagttacatatccggcgagaaggcgttgcgaggctcgccctcactcccgccccagcatgagagatcgaccgatatcgtgacaaagccctgctcggccaacttggtggcgtagaggttggtgctctgctccttcacagcgcccatcgggttgccgacgataatggcaggtgcacggacgctagtgtcgagaaccttggggacgaacagattggccgcgatagtcatcttgaactggttctggaacgtgatcggatgggggagggcgcattgtcactgtgtagaagttgtccgctccgggcacgtcggcgaggaggctaggtgcggcaagtgttaaggcgacgatctggctttgaaaatgcgaattgcgaagtgaattcttatctttcaaagtcgcagctacccggtgcttctcgacgaatgcttttgtatctccataaactctttgtggcgtctgccactgatggccagcgaggacgttcttgccttccataactcgtaataagacgtacttctgttcgcgcattgatcaacagcgcacttgacggactaagggtaacggtgctcaatttgccacaaaaagtcacaaatcacactatacctccgcaactatcgcgaattatgaagtcccactggtggcattcgaaagcggagtatttcgtcgttcgtttaacgtgtcaaccatggcaaacggttgcatattcacgaagccattaactctaagaaaacgtgtctattatcaagggcgcttttatatggctattgtgagccaacacgtatctaaatgtcgatctgagttccagccaggtatcgcttgatagtgcgtatgggtacaccgtagacacgcttggcaccattcagcgagagctggtgattcttaacagcagtcattgctctgaggaggtcgctttcagtccattgcttgtacgtcttcttcggcttggcgaccttggtctttttgagggagatgcgtcgagtaacagccatgtcggtgtaggtggggagatgatttgtcgccgctgaggtcgaaaggagaatgagagacttttatgagaagcggcaaggagcgggtagatgaaatctgcgggtagcacgcagcaatgcgcgggtaggacgcgaggacgtgaagatctagcatgttggagcgctcttcaaggtgctcccggatgcatgtggcaaattggggggtatggcaaattgattaccgttacccttaactactgtagcaacgctgctatagctcgggatggcaccatccacggaacctgcatctggagcattttgacccagaaatggcgcgctgaacggcacgagctctgaccaagagacttcgtcagtgactgacttcaatctcctcccaacgtccagtgaggtctagctgttcgctggttagcgtagcttcacctgtcgtgcagtgcaacttcaactttgggtcaagtatgaatttctcaatacattcctctttcggggtattttgatttgcatgacacttatcgtcacatttgaatctgacaatcacgaggaaccatgaagcgctcctgggtcgaagagggtgactgcgtcttaaagttgtttgcactggctatcgttgtcgcccatgtcggtcagattcaaaaatgacgatggcccatgcaaatcaaaataccccgaaagaggaatgtattgaaaaattcatacttgacccaaagttgaagttgcactgcacgacaggtgaagctacgctaaccagcgaacagctagacctcactggacgttgggaggagattgaagtcagtcactgacgaagtctcttggtcagagctcgtgccgttcagcgcgccatttctgggtcaagttactcatgtggtgcctacagaagaggggttttctcgctcaccaccttgatctctataggagcttcgagttgagctttacccgcggccctcatggaactggcagtcgctgtttctgcggcctttttggagtgacggcttttcacacgacgacgagcacgttccgcaagaagacgcagacgtttcttcacgaaagccggtccagtgcccttgaccaccttgcgatagcgagcctgccagtagtccacgatatcgtgaacgtacacgtcgctctcgtcttcaatttcctcctggatgagttcctctaaaatatcctccaaagtcactatgccctggaatacgacgctgttagggatttcctcatccaagctccaacacttcaacaccacgtcgacatcctccgtgactagcgcaatgtgcgatcgacctttctggaactcgttcaagatggagtaacacgattccctaggtccagcaatgatcggcttacgcagaatcaaatcgcgaatcggacggcggtcatctggatccagcacgatgagcttcttcacgagcagcagacccacaatattcgacttgtgtttttcatacaccgggatacggctgtgacccgaggccagtacactggccagtacgtcaggtgaaagctccgtgtccagctccagcatgtacacgtcttccatgggaatcatcacctccgtgacagtcttggcagccagatccaaagcgccgtgaataattgtgacttcatccacatgcagacgcgttccttgtgccgagtcctcgtacagcgagtgcggcgtcaacaacggttgcttgtctccaattgcagacatcgtagtgaccgtgtgcgagtgcgtcggggtgtcctccagttgctgcgattggcggatgtgatcaacgaacgagcggcgcgccgcgtcattctcacgctgcagcgtcaccaaagccttgatctccttgcgcttgtactgggccgggtcgtggtcgtctcctagccacatgtcgagcacgcggctgatcggatacgaaatggggcacgtgatagccatcagaagcttcacaaaggggcacagcattgcagcgatcttgagctggttggggccggtgaacaccgcggacgggatgatctcaccgaagagcagcacacaggtcacggacagcaggatggagacggcctcgggcaccagcttgttgaggaagatggggagcgcttcattggcgctggcgttcacgatcagcagcgtcaccagcagcaagtggtgcttggtcagcacgggcagcacctgcttggcgtacctcttctcgtcctcggacccctccatttcgaggatgcgcatgttgagcatgtccagcgacaagaggcccatggtgagtccggccatcataccggcagcgcagatcagcagcagcgacatggccaggtacaggtagaacgacgcggggtcgcaccacggcgtgaagaactcgcactcgtgcgttgcggccatcgcgaccgtaggggtcgtggacaacatgaagggagcggagtaccctcggttgagtgaaagcgcgtccgaccgacacgaagatcggtaatggactggcgatgggggtggtgaagcggggcgggcagacgctggctccggtagagcgactcaccagcaggcgggtggtctacgcgaatgaggacgaagcgattgatacgttttcgagtgccagcaggtttttagttactaatgttgttggtgtgtacttgacttgggccgagtatgctgtaccacactaattggtgtgtcgcagatcaagtgatgatatgagggtgaattttacccacaccacgatgttgacccaaggtatccgctcaaggaggcactgacaaactgcacatgcgatggctacggcaatctacgaggcagcggtgagtcatcctagaattgctacggcctccttcttgttcttgacccgggtcttggacttcgtggattcctctgttgttgctgcggtgacgtcgaccgaaatgtccgctgcggtgaacaagtgcttcaagttagtcttaccgccaagcagggacgcattgagaagcatcagcgccgtacctgattcgagtgcagcggttggggccgcgggcatcgctgcagccagcgcctctgcttccagcttctcgatctcggcgagctcgctgagcacagcgtcctcgtcctcgacggtcaggttgccgccgatgatcctgctgatttcctgttgaaacggtgcgttaccacgttgaatgattgaattcgagtgctaataacgccactgcagccgcaagacgtacattagccgttgcctgtgcttcttcagtctcgagcatgagctcctccaccgcctccaccgtcatttcctgcgccacgtacgagccattgcattcgtcagcaactgccaaaccccaaatgcttcccgcatgcagccaaaactatcgtcctccaccttatgaatggcgttcaaaatggaattgcccgccttcagcccttcgaaaacctgcagctgctgcgtctcccactccaccgtgtccagcatacccagcacctggatcaagtgctcgtcggcctggtgcatctgctgttccttgtacttcttgagcttcaacgccagcttcgcgcggtcctgcacgcacacagatcaagcgagccacaagactctaattcgtcagcccaatagccaccgccaccacgtccacaacctatgagcagccagcacggcacgcactctcttgccggcctgcagcagccgcttggcgctgtcgtgcagctggttggcctcgatgtccagtcgcgcctggtacttcttgaggcggtcgcgggcgttcttgaggtcgaggatggccttgtccttggacgtgatctgcgcccgcacgccgctcgctccattgctgctgctggcagccgcgcccgaggacgactgctgcttgttcttggaactggagctgcccatgctgggtcgcaggcaggagcgtcgacgcaccgccgattgaaagagaaaaatggcaaaaatgagggttgtgattggtagaacgctgatttaacgcatttggattggttaaaactagcgcagcgcgattactgcaatggtttggctcgcatgttgatagcaacggaactgtagttagagcctggcgttcttggactttgggccaagcgcccgcgccaccttcgattgggtggggtggccaagcaggttcgtgatgaagtcgcccgctgccatcaccttgtgcaggtccgcgccagtttggatgcccaggccatgcaccatgtagagcacgtcctcagtcgccacgttcccggaagccccgctagcgtacgggcagccaccgagaccggcgacggagctgtccaccacggcaatgccctcctgcaacgtggcacagtcgtgagttgaatgcgcacgtcaaacgcaagtttacgacaaggttgttacctgtaacgcaatgagggtgttcgacaacgcctgcccgtacgtatcgtggaagtgcacggcgaggcgctcgacagggacgacctgcttcgcagccttcaacatagccaacgtagatgctgataatagcaggaatagagagtggttagttgttgagtaactaataggcttcaccggaaattgcaacagaaatcttacccgggttgccaacaccaatggtgtcgcccaacgacacctcatagcagcccatctcgagcatcttctgagcaacgacagcgacagcagagggttcaacgggaccttggtacggacagcctagcacgcacgacacatatctgcgtggtcgttagcaattatgaactgatgctcagttggcatccaaactcgaactcacccacgaacacggattccgagtccgctcgccttctcgcagactgggcggaagcgctccaagctctcctcgatcgagcagttgatgttcttttggctaaacgcctcggacgccgcgccaaagatggccacctctttcgctccagcctccacagcactgtcgaaaccctgcacgcatatcgttcagttagcgtccggaagctgtacacctcgcggtaccaccaacgtaccttgatattaggcgtcaaaactgggtacgacacgccctctctgcgagcaatgcccttcaacacgtccgagttgtcggccatctgtagcatggtaggaccacggctccgttaatgatgatcagctcgcacgcactcaaccttcgcctcacatgcatgctattttatattgttaccattagggatgaactagaaaacctcacctgcggaacccacttgggtgacacgaacgacgtggcctcgatagcggacagacccgtgtcggacagcaggttgatgagcttgatcttgtcctgcgtcgagatgatggtcttctcgttctgcaggccgtcgcgcggccccacctccacgatcttcacgaagctcgggtagcccgacgccgccgcggtgggcgtggccgagcccatggccctggccgcgagcctcttgctcgctgccgccatcgcacggcgtccgcgcgtcgccgcaggaaccttcatgtccgacggtcaatgatgcagttccggaagtgccgagacgcggtttgatctgtcaaacagagtcgttcttcaacgaggtgtgcgccacaccacgcttagaaaaagcctgacccattttatacccccatttcctcgttcgagcccaaaaagtggcgaattgatctcttcaattgggctcctgcgctcttcgccagtcattcgcccagtcaacgcctgcggcatacagatcccaagtcacttgtgcgcgtgaaacgacatcaaccgccgcagtatcaaacaggccccgttggttggttgactgcaggcgagtgcgcaaagaccttcactctcgctcccgaccgacagccatggccagcgcgttagcgagtcagctgcagcatctccgcgaggctggcgccggcagcaagcgccgcaccgatacgttcctgtacgaccagcgcgaggcggcgcgcctggacgacgagaccgtgtacaacctggcgtggaacgggctgctggagctcaagcagctggacgcgcgcttcgaggagctggacgccgacgccggcgtggccaagctcttcagccgccagcgcatccacttccaccgcgcgcagaccaccaaggcggacgagcaggagctcaacgacgcgctgcacaaggtgctggacgcgctcagcgcctacttcctgctgggcgccgcgcacaaggtgctcgagttcctcgtgcgccgctacgaggtgcaccgctacaatgtggacgccgtcatggccaccatcgtggcctaccacgagtcgtcgtggttcgtgcgcatggtgcgcatccttcacatccacgagacccgctgggagtttctgctacccgtcaaaacgcagggcacgccgctgctgcgcgccgcgctcgtgcagcgcgccatcgatgagtcgtccgtcatcgagttcgtgttccaggccgccgcgcgcatcggcgccagcaaccccaagctcacgtcgctctacacgctcgtggtgctgcagatgctcgagcagagcaaagtcacggagaagatgctgcgctggctcatcccgcagctgctcacggcgcttaagagcgaaaacttcccggagctgcagtcgtcctcgtacatgatcgtgaccaagctcgcgtctaaggcgacgcttacggataaggtggtggacgcgctggttaagtctctcgtcaagtacgcgcaatccggcgcgcagatgaacgcgcttctgtgcgtgatcttcctggcgcagacgcagccgtcgttccgtctgtccaaaagcgccggcaagcacctggtgcacatggagaacgctgcggactttttgcgcgacgccacagccagctacgagtcagccaagttcgtgcagttgctggcgatctttttgacacaacagatgaagtcgactgaagacgactgcttccgtctgctgacgacgctgatcgagagcgtctcggtgctcgataatttcacggaagagctggttaagaccttggtggagcaggcgcaggagcagaaattcaagatggacgacccgcgcttgcaggcgatttcccaggctcttgttgctctgagcaagaagaacgcgaccaaggtggacgcggttgttagcggcctgctggccaagaaaaacaagcacaggaagctggacgcgttcctcacgaagacgtttgaaaatgtcgccaactcggcgcacttcgtaccatcaaacacagacgctaagacgtccctggctctggcactggaccacccgacggagcacatccgctaccaggctttggtatcgttggcaaagatgaatgacgccaactccgagacgaatgaccaggttcttacgagtggtgatgttctcctgcggcgattcctggacgacagcaagcgaattgcagcatttatgatttccagctctctgggcgacctgatgttgagcttgagctccaagaagacgatgctggacacgatcgtacaggcattgcgcaagtggtcttctcgtggagaggcgtccgtggtggaagctattgctgacttcgcgttgaagaacttccgtaacacggctgcctccacggacgctgacgaaaagttgctgatcctgtttgtttccgtcgtggctggtgaggactccaacaagaaggctgtcgttacggtggacacggtctggacctggatcgcagcgctcaaccaccctttcggtgtcggcgcttccgaggtatcaacggagggcgagaaaacggttgccgacttggctgaaagcttcggtcacgcgcttgcagctaatgttaagggcttgcttccgttctgtctgcgatggtcgcagaagtccgagttcaacgaaactcccatgacaaacttcctcattgaggtgctttctgctgcccgtactcagctggcttcgaaaaagtcaaagacgaagaaggcgaaggaacagcaggtatcgctggatcagtctttccggtttgtgctgaaaaaggaatttgtgtcgctgtgcgaagaaaaagcgtcggaagagcgaattgcgcaagctgtgcgcgttgcttcgaagctgtcagaggtgctttccgatctttacgctgtttctcgttacgatttcgacacgtgcgttgctacgttgctgcagtctccgacccccgtatttattcgcattcaagagtgcctgctggagctgtttcatggggagctggaatcacaattgttgcccactatggcccgcattgtcacgaggcctgattcttcgactgatgtgctgagcgtgttggcgaagacgcgatcgctggatattatttctgcagttcttgaaggcttttcctactctgaatcggacgaagagcttcagcaacttgtcaatgccattccagtggtgatcgtggcgctatcggactcgagcaaggtcgtgcgacaagctgcggtcagctgtctagatcgttgggttctgtcctgtggcgatgctgttcgtgaatccgaatcgaaggatctgaaggtgcttcagaacgcgtcttccttcttcctcctagccaagcaggacatgacgatggacgcgaactctgtggctacgctctgcggcacttacagcgttcagacggaaagcgctgctttcaaccagctgcttatggacttcgtatcttctgcaagcagcgatgaaatgtccattgcagtgaagcttcttgaattactgaagcccgtgaaagcccagtccttctggcttcaatctgtggacttcttccagcaggcgcttgctggttgctcgaaatccggtgctgatagtgaaaccgcgaagctgctgacggagtttctcgcgcactacttggatgtggacgttgcaattacgacgacgaagcaaggcaagacttcagtgcccaaggcgtttttggatgccgtcctggccaccttgctagctgacaaggaggtggttgcccatttgaaatcgctgcagctcttcgttgtaacgaacctgtccgctacgctgtacgaggcccttgacgatgtgtctcgcaacattgtggtcgacaagcttctccatcttctgatgtctgccgacgaggccgtcgcttcgaagttgatccaatgcctcaacgccttgccaatcagctacaacatttttgtgcggttgctcaaggaacagcttgattctacagtggagtttgctgagctgagctgcgttcttgaagtactgtcgatcaaggtggacagtccgtcaagttgcgaggaaccggctgctgacattagcaagctgctgactactctttgtgacgttcttgctctgttttgcgagccgaagcacgagagcgtggtctcggagtacatccttcaggtgcttttcagctgtttgcgtcgcgtttgtgaagtcagctcgtcgtcttctaagcaagtgaatggtcggccggtgaagactgcgaagcacgtggtgacggacgtgaagcccgagcttcttgtgaagcactcgctgacgtgcttggcgcgcacttcatccccccagacgcgcaatgaggcgctgctgttcattagctcgctagtgaacttgcacccagctagcgtcctggcgtctctggataaaatcctcagctttgttggtgctggttctattcgtcacgaagacgagtactctttccatgtgcttgagactattatcaaggctgtggttccgcacatcgtcgaggccaagaaccgccagaccaatgcgttgatcacaccgcagcggtttattggtctgttcgtgagtgcgttcaaccagatcccgaagagcaagcgtggagctttgtttgaggtggtggtgggatcgctgggcactgaacttctgccatactgtgctgtagcgctgttgcagcacgctgctgtcgtggaggacacggacgcccaacgcgagcgtgtgcagtttgcacacaacctgtgcttcagcttcacgtgctctgagcaagtctcgtgcttggtaatgattcttcgtatggcgcgtgacctgcttcctcacgtggtcgaagatgcggataccgacacggatgacatggaggacgacgacgatgatgtggagtacgagcgcttcgtgcttgatgagcagttggcaagttcgaatgggctctgccgtcagttcaactcaattctggtcaagtttgtgacggcacacctgcgcgcgcgcgagctgcactacacgattttgagctatgagagcgagcgcaaccaggccgacgaggaggaggaagagggcgacgtgctgcagcacagttatttgatgctggcgcagctcgtgttgttgtacttccgccgcgtggcacgagagcagtctctgcatgacgatgaaagcggcttctggtcgacgctggcttcggactcaattgagattctcaccgcgcttcagcagcttttgtccacacccggtttcgttgctgtcatcggtgaactcctgcaccacgacaacagcctggtgcgtaagaaggcgatgcagctgttcaacgaacgcctgcaggaggaacgggattcgcttacttcgggtgaggcgctgctctttatcgacatgctggacgagctggacaacattcttcagaacgcggaaggctccgagaacagcgtgaacattcagacggccctgctgagcgtggacattttggcccgcaactttgctgatggccaccccaagcgattccagcagattcttcccactgttgtgaagtacgtggaccaagacgtcgtcaacgcgcctccaatgacgctgcacctgttcggctgtgcgttcgtgtgcctgtcgtcgatctgtcgcgcggtgggcccggtcgtgttcccgctcttgccgaagtttttcccgcggctgttgaagggtattgagtactgttcgtcggccaacagcgttagcggcacgaaggcggttttgcagtgcttgttggctgcgttggaggtgttcaccgacaagatcccgcagttcctgggaccttacctgcctgctgtcgtgcgtgctcttctgacgccggctgtgctgtcttctgctccttccaacgtgcaagtgctgatgtctgtagactgctgcttcctaaacctttgcaatcacgtcgagctgcggcagttgctcccgactctgtttggagcgtacgagcacgtgctgaccctgcagagcgacacgagtgtgacgcggttgttctcggtggtgggcacggtcgtgaatgatttggacttgcctgctatccgcaagcacctgccctcgtttgctcggttcttcgtcactgctttggacgctcgccgcgtgcatgcttctaagttggaggacctggatgaggttgaagacgaggtgctggagtgcttggtgcagttcatcctaaagctgagcgagaagcagcttaagccgctgttcctgaagctggccgagtgggcacagacgcgtgtcggatcttctggcaagtctggtgacatctcgcgccggattgcattcttcaagctggttgtgaagctgtcggagcgtctgcgtggcatcttcgttccctattacgcccacgtgctcgagttcctgacgacggcgctccgcgaaagccgcaagttattgatgcagaagccgcctcggtcgtcggaggaaagcgacagtgatgatgacgacgacttcttcgcgagcgaggaggaaccgccgacgaagaaggccaagcttggctcgtcagcctccaccgttgatgccaaggccgagcgcgagctgaacacgctgcaactgagcaccgtggtgcgcgcgttggatggctgcttcgtgcacgacaccgacggttttatggagaaggaccgcttcgacgttgtgctcaccccgctggtggatgtgctggacgtgctgcagtacgacagctcgatgcgtgagtttgtgttggagaccgtggcgccgtgccttgcgaacctggcctgggccgccaagagcgacctcctgtggaagccgctccactacgctgtgctcatgaagtcgcgtggtgacaacgccgctgtgcgtctcgcggcgctggtgacggtggagaagtgctaccaggtgatcggtgacgagttcctggcgatgctgcccgaaagcatccccttcctggccgagctcatggaggacacgaacgacgaggtggagaagacgtgccaccgcgtcatcaagcagatcgaggacatctcgggcgagtccttggaccagtaccttacgacctaagctgcgaggcgtaggttgaaatagataggatagccacactatgtagagagattcgcctcggcgccggcgtctggcactgaccgtcagcgaggacgtttttgcatttcataactcgtaataagatgtacttgacgatacactgccgactctagtcaaagtctttacgtacacgcagtgccgccgtggcccaagtgcgaattcctcaatacgctcagcttccgtgatattttgatttgcatggctatcgtcatttttcgattttcgagcacgatgaagcgggctcgggccgaaggagacgcagacaaagcccaccgccagtacaaacacctgaaaggcgcccaacttcctgccgagatccaagcaaaaccgcagattatgaagcgcatcgacgagtttgccatgtcaaccgaagctgcggctctgcaggctgccgccgctaacgacatcgactggctgcgcaagctcctaccccacctccgtcacaagatggccgacgtggcgcgtgcaatcatcaaaactgcagcaacgcatggattttgggaagttttcaaccttgtggatacctggtgggcgcctgaggacgaggaaggaaaggaggaaaagttcaggactggatgcggcgactcgctggccaaggcgatcgaaggcggccacctcgcaattactcgcgatcttctggaaggctatgattgcgactactccgccggacttgacttggctctgaagttgggaagggaccacgctgctgcggagatttatcagtccgttgacgacccatacatggtcggtcatcttcgatgggctgccaggcacggaagtatgcgagtgctcaaggacgtgtacgatgcttgttgggaggagagccttcctgaggcaatgggtattgcagcttcccacggacatttcgagatcgtcaagtttttattcgagaaatgcagacaccaactgctcgaagtcgagaatgatcgtgacgtttataaaagaccacttgcatgtgcgatcatgcatggccaagtggagatcgcgaagtatttgtacgcaaacggcggatatgcagattacccccttgatgagttgaaggtggttgtggctgctcgtgggccactggaacttgtcgaactattccacaaggacgggaggcgttcgaatatgctgctggtggggggaaagtggacattatggtgtttctacaggcacatggaggctgcaccactacttcttttgataagactttcatgaatgcggcaattaatggcaagatcgacgccatggagtatctgtagagttcaagatgtctactgcttttaccaattaagcgttcgttgccgcggctcgtgatggttgtctcgattctgtgaagttcttggacgggaaggagcccctttcgcacgacattataatcgaggcatttgaaagcgcagctactaacactatcgcgggggctgtcgttggcgggcgagttgacgcgatggagttcttgtacggaaacggctgcattacatcggagaagatcagccaagtttttcttgcagcagtgcgtcgatgtgatcaagtacctgtatgccaaagcgcctgtgtctccgtctgtgattgacgaggcgtttgagagagcagcagttcagcacagtgccagtgtactcaagttcttgctccagaccggcgctgtttctcccacggcagtcgaaaagtattttctaaacactgttcattatggacgcatctatgatgttgagttcttgttcgaatgcggatgcgtctcgcaaaatctgctggaacaagcgtttgtgcgcaagcgcgtcagcggacggatggaagtcttgttacgacaatatctgaaaaagaaataacgaaaaggagaagacttttcataaatctctggaatatgccaatgccaaaatcgactaggcgcgcgccacttgtacttgcgcgagaagattcatgatcgatcatccacctactgcaatacccccccgtaaattacgctccgcagtatttacgtcatccacacccgacgaacaaggttcatgctgatcgatgtcggcagacgattgcctttacactccacgcccaccggggacgtcatgcgaaggcgtttgggtgattacggtgggggaagtttatgaagtccgagtttatgaaggcgaagtttatgaagtcgaagattggggaatacaaaaagcaagagaaacagcgggaacatgtagcagtcagtctggaagctactacgtagtatgcaatcacttcgcaatttgcgcttcaatccgcatcgtcttgccgaactcagccagccttctcgcaaaacatgtccggagccaacaacttctaccgcagtaacaatgcgccatcccagccgatcacgttccagaaccagttcaaaatgactattgccgccaacctcttcgtcccccaggatttcgacaccggcgtccgtgcgcctgccatcgtcgttggtcacccgatgggtgctgtgaaggagcagagcgccaacctctacgccaacaagctggccgagcagggcttcgtcactgtgtcggtcgacctctcattctggggtggcagcgaaggcgagcctcgcaacgccgttttgccggatatgtacgtggagactttcagcgctgccgtcgactacctcacgttgcaggacttcgtcgacccggagcgcatcggcgcgctaggtatctgcggcagtggatcctttgccatcggtgcggccaagatcgactcgcgtatcaaggcagttgcaactgtgagcatgtatgacatgggggccgcatgccgcaatggtttgaggaagacacagagtgtcgagcaacgcaaggccgccatcgcttctgcgacgcaacaacgctcagttgaggctgccggcggagaggctcagtacactagcggcactgtgcacgagcttacggctgacactcctgatatccaacgcgagttctacgacttctaccgcacgtcgcgtggcgagtacacgcctcccggatcgacgcgggccttgactacgcactcgacactgtcgagtattgtgcggttcgtgaacttctacccgttcaacgacatcgacacgatctcgccacgtccggtgctgtttgtgtctggtgacctgtctcactctcgcgagttcagcgaggatgcgtacgcttctgccgctgagcccaaggagctgtactgggtaccgggtgccggtcacgtcgatctgtacgaccgcacgggcctcattcctttcgccaagttcacggagttcttccagagcggtctcgccctggacaacacggctgccgagtagacgcccgattcttgcgaccacatctgaacttctcgaatttgccaggtgtgactgactagaaaagatggtagtacatcggacaactaggtagcaatagctactgctactcaaccgagcaaccaatcaacaacaaatacatgattcgtcttcatctactcactaatcgggcactcacacagtttatacgcggactgtgaggctggttagggagcggctctgattgaagcaacactgatatccatgtcgacggacctacactaccaatggacaggctcgtagtgttgcccgacagcaacactgatcgtttcccacaaatagtttacctgtatctctcgtagcagaatatttggtttaccaatgttacagtagtggacacgcgtcaccacgacagcgatgcaggcactctgcatggctcaacgcggccaagccgcccatgtacaatgccgccccgagattccgccgcttggagacacggactcggcaagcgcgtgatggtttacgcgccacgtgcaacagcggggggagagggggctctacgatatctacgcgcgctgcgcgtagatagcactgtaagacactagtctattactgtagtagttggtaggacacttgtctcggtgtcttggggaaaatatatgtggttgcaacgctcgcatacgcaacacccgccttatctgcgtgtgttagcgatcgatgaatgcgcgcagtgaggctcacgcccattaacctaactgagatgttgcgctgttggctggaggcgcattataagcgcgtacgactgcttcaaaagaatcgcattcaacacgcatcgctgactaggacctaacgaaacgcactgggaaggcgtttgctcccgcatagtacacgcatgtatataagtaccacagaaggacatgcacacattagaataaggttaagcaggaggccgctgcagacggtcgcacatcagggagggcacgagcgcgcaacccggtagattctgataatattattatgagctgttgcgagccagtcgctccaaattggagcgactggctcgcaacctccaaacgtgaaattcacgcctgggaaatttacattagcgatgtgaccttttttacgtagtaaaattacggttgtagtggtgctggtggacctggttgtcagtgttgctttaatgacttccttagggagcgatatctttccgtaattgtttacaaaacgccaaattacgacgaagtagcgcttggtttcagcgatttacttataaagatcaatcataaaaataggtggaagtggttgccggttcggcagcggcagctgagatgaacggtcgaacgagtgatgaagcctcgaaagtaaaaagagcttcacgtcaggcttgatcataagagcatttaccagcgtgttagagaacaaatgtctccccgaagctatcaatggcattactggagaccaagctcgagtactggagtatttgtacgacaaagggtgtattccttcggagacagtcgaaggtccgtggcagtgctggagcaatcaagttcttgtacagcactgggttaatctggtcggaaatggttgaagacgcgttgcaaactgccgtgcgcgataacactgcagacgccgttgctgctgtgatctcaactggtgatatatcggtagaggtggtcgagaatgttttactgaaagccgtcgatagggatgacgtctacgctgtaaagggtttggcccagtgtgggtgcaatttacgtggcgctcttaaaaagtcatggcttccacattatcgtcgaagtaaagtggggcttttcttcagacagaacggggataccatcgagatgacccagagtagcgtccacttggcttcaagcaacaacacctctgaccacggtctgctattcccatggaagctccgggtgctacctagcattatgaggctcatcaacgagttcacagtatcaaccgaagcggaggtgatggaggcagctacaactggaaatacggacgtgctattgacacttctacctcaattctctgatcaagtaggtgtcggactcgctgtacacggggttcttgaagtcgcagcagttcatggacatcgcgattcgatccacgtggtccatcgctggtgggtttgtggtggtaggaggcaaaagaggaagatcgaatgcggtattgccggctttcttgcgctggtacgaaaactccgaggggtctcaggcaatcaagaaattgttccgccctagagccacggctgcgctcgaagaagctacctgtcgggccagctaggagacatcgagctcatatgcagacatgctccagttaccaggcgcttgctttgggcagcggagtatggtcatcttcaagtgattaaacttgttttcccaaggccagacttcgacgtgcaagaccagatttactttctgcacgtatcaatgcttctagcgtccgagcatggccatttcggcattgtaaagttcttgaatgagcgttgtggagatggtatatttcaatatggcgagaatgttgaccatgctgcttgtccgctgttagttgcgattcaaggaagatcgatggagaccgcaaactatttgtttgcgaacaaaaaattcaaggtatcatcgtttacgcaagccttcctttctgctgactcgctcggatctctggatcttgtaaagaagctgtacgattacgggaaattcagcgcaactttactcggtgatgcttttgttggtgctgctgaaaatggacagttggatatcgtggaattcctgcagtctaaaggacatattgacgacgaacaaattggcaaggtactcgaagctgctgcaggttgcggtaaattcgacgcggtgaggtacctttatgcccttcagggatttaaaccatcgcctgtttgggttggaaaggctttcacagctgcagcaagtggaggccatctcgacgtggtaaaattactggatacgaaggagtatattccacctgcgacgattgttaaagcctttggggaagcagccaaggacggcggccaaccatcttcgtacattgcagaccccgttgatgtactgaagttcctgtacgcaacaggctgcatcaccactgcggaagtgtacaaagtgatcccagcagcagcggcacgctgctgtgtggacgtcatgcagtttttgtatgccagagggacggttccgtcaatggtttccgatatcgcgttcgccgttgcggttcaagcaaactgtgctgcggtagtcagttttctctgcaagaccgagaccatttatgccttggcaatcgaagacgagtttctgagagcggccaagacgggcgacatttacatgctaaatgcaattgtggagtctggctgcgttcctcaagcgctggtacgaaaggcatcccgaaaggtctacggaaccagagttgagcaattcctgcgtcagcgaaagatctaattaataccacacgagttggctggcggacctatcaacattattaaaatttacttcgaagtatttgctaagaaacctgggtaacgacatatcaaacgtgacaagaatgtttacatccctttattctttgacatgttagataggttgaagaatgtgtaacaagtcatgctttcaatagcttcataactgcgccttgaagcatgcaggagaccatacctcatgatctccggctcatgaaagtatatagttcagtagtgctgcaaccactgcaaagttaaaaatcggctgttgttgtaattatgaggattcaaaaatcctgacaaaagcagccataacattcagttacccagcggtttatgtgctcaagcattgatgaccacaatcgccacccgagcccgtctcaagttgagactctcaacaagcacctgacttcgcaggtagatccggactggtgccttaaaaacaccggttcaagtaatattttccgttgtttgtgacatctgcatcatgggaatgcaaaacgataaatttgctcatgtgatacgtgtacgtggtacatgtattgcaatcttaacttatagagccgtgcttgtatttatatatgtatctgtattccccgctcagtactacagtacactcgtggcgggtgctgccgctcaagttcctaccacggagtgcaatggcccctacgcccgaaccgttcccccgccaggagctatcgtcgtcgacatcaccggcacgtacaacgagagctaccaaagcttggcggagggtctgatgtacctgcccaacacgacggagcagcacacgctcttcctgttccccggcgtctaccaggagcaagtggtgatccccaagctggcgggtcctttggtgatccagggctacacgtgcgacaccatggcgtacgccgagaacaagggctaaagcacggagaagctcggattttatcatgtagttttgattctaggtttgattctaagttaatttatcttaaatgtgcctagcagttctacccgaggttctttggttagagcatccttaaatttcagcagttggtgcttttgtctttgttcgggtttgctaccaagttccgaaaccatactgccaactatctcaagcccttacgcgagcatgtactggtcactcgctatgccttagctatcttgcaataatatgcagccaacgtcaaggcttgaatgcggcggtaacggtacgtatgcacgtgcagaatggttgaaacgagcacgtgcagaatggttgaaacgagaccagcatcgtttgaagacttcaacgacacccacgactttaaattgaagtcgtgggtgttcgtgggtgtcgttccatgacttgaacgtggcgacaccgatgtaacatcgttgaacatacatgtactgcaaacacaactgtagttatgtttggagtcatggtcgagcgacatccaatcgatcgtgtcacgcgaatgtcgaccctaaaagactcaagcaacacgccgctgggtaatatattatccaagcgtttattaaggtacgttccgatacgttaatgatccgttcgtttataaccgatagcggagcatgcatttttataatgatttgcacctgcagtcgtatcgccctaacaactctggataaaatccagagaataaccgagtcgcaaatttattaataaatgatacatatatatatatatatattgccgacgaaggttcaagggaacggggtggggtagtttttccttgcaaaacaaactcactgctacctaacttttgatttttggtttcttgacacgaaattgattggcttcctcatagatcgactccatgaaacacgcccgcgatccccgctgcgttcaacgcccatgcaagcggttgaagggcgcccagttcccgcgccaatccgggacctgccgcacgtgatgaagctcatcgacatctacacaatgtcagccactgaggcgttgatagaagccgctgcgacgaaccaagtcgagtggctcgacaaactgctggatctaccggagctcgatggcgaatgggacgaaacggcggcactcgccactgaagttgccgctgcacacggccactgcgacgtcatttcagtcgttcacgcacatgtgcatcagcaggctcgaacggttcatgccgaaggccatcgctggtgggcacgtgactgcgttcaagctgttactggatctctatggaaacactgaatggctgccgggcttattgagtcaggcagtgaaaaacgggcaacaagagattgtcgacattatttgcaaaggagacgagtgccgtgaaacgctggagtgggcagcaaagaacggggacctttacgtgatgaagcgcattctaaagtaccaccaatctgttgacgagatagtggtcagccttacgctgcagagggcgtctgcagccggacacttggaaattgccgagcttttggttgggaattatgaaggacaggcactcgacgtacggttcgcacttgccgatgcggttacagaaggtcacgtggagattgccaaatacttgtacgccaagaaggggttcgacgctgacttttttaatgcgatgtttgtaagagcagcgggtctacgctcacttgagacggtccagttccttttcgacaaagcaaaaatacacgctcagtcctttcgcgaagccttcagattcgcggcaactggtggtcaggtggagatcttgaagtttctgatgtccaagcttggctggtgtatcgacgcttcatgtccgggtaaagctttcgtgaaagcggcgaagcgggatcattcagagatcctgaagctcttgtacacaattgaaggatgccaagtttcggctcgagtactcgaaactgcgttcagtgcagcagctgcacgcggaaatctgggagtgatcaagttcctggatagcagaaacctcttttcgcccgactttcgtgaacgcggccacagagtgcaaggtgaagtgtgcagctattggcgatcaagttggcgtattgaagttcttgtatgccaaaggatgcatcgattcagagttgatcaaccacattttccctgcagcttcagcgcgatgctacgttgaagcggtggagtttctgttcgagaagggcagcatgtcagccgatctggtggaagccgcatttttaaacgctcttcatgaaaacagcgctgatgttatcgggtttctttacaagactgggtttgtcgcccaaaggcgggcaaagagggtattctaggtgcagccagtcgtggagatgcttatgttttggaaggcttgcttagttgtggctgcactaccactcgggctgtgctggacagtgcactgggtatgtgctcttcgataaggatccaccgactaaccgactactagctcgtgcttacaagttgttgacatcggaggaaggctagagatctgtcgtatgtgtcggttaagtatcccataccgcaaagcataccgatggtatcgagaatttttacgtgtggagattgacaagtcttggcgagcgacgagaaatctcgtgggaatttcagtagcaccgccatttctcgcatctcagcttaatagccatgggccgcacccgagcattcgactcactcctgaccacgcgtctacagggtgctgggttcccttgcaagatcgaagccctcccccatgtgatgaagctcatcgacatctttgccatgtcgacgaacgaggcattgattgaagccgccgctacgaaccaagtcgagtggctcaacacactgataacccaaccaggactctctaccaacgggtatgacgtcgaaacactggcctctgaagtagctgcagctcacggccattgtgccgtaatctactacatttacgagagacggtcgcaaaggggcgtagacaacagtgggttcaagtctgcacgcttcatgttcaaggcgatcgcaggtccgcgtttcagctcttacagcttctttatgggggttcccgtccattgtcggatctgctggggcacgcagtcaagtgtggccagcaaaaaatagtcgaattgctgtgcaaaacggaaaactacaggcaaacactcgactgggcagcgcagacgggaaatctccaagtgatgaagtgcattttaaattgcaacaagaccgcaaaaggcgacatgcacgcactcaattaagctatggagatagcggcagctgctcgacagttcaaaatggtcaagtttttgaatgagaagtgtgatctgggtgcccagctacgagacctgcactttgctcttggaaagacagtttagcgaggccgcgtggatatcgccaagtactcgtacacgaagaacgggtgtgatgctctttatctcaatcgaatctttgtagaggcagctggcgttgggttactggagatggtcaagccgttctacaatgaagataaattgagggctgattcactcagcgacgccttggtgtccgcagcagctagaggtcacctggagatcgtgaacctccttcaatccaagcctgactataatgtggacgctatgggtctgggcaaggctttcgtgaaagcagcaaggagaagtcaattgcaggttctggagcttttgtatgcaattgaagggtaccaagtttcagctgaagtactggagactgcattccttgcagcagttaaccttggaaacctggaagtggtgaaattcctcgatagcaaaatatttgtttccccggatttctacgttaaagcctttttgagtgcggctgtggagtgcaacaccacgtatgtgactgttggcaaccaagtcggcgtgttgcagttcctgtatgccaaaggatgcgtccgtcctgagttgatcagccacattttccctaaagccgcagcttgtagctctctcgaaggggtggagtttctatacaagaagggctgtatatcgcccgatctcgttgacgcagcatttgagaaagcggtccttgaaaatagcgctgatgtggtcgaatttctctacaagaccggcttcgtcagaactgagtcggtcgaaggagcgtttttgatcgcagcagaacgtggtgatgtgtatatcttggaatgtctgatcgaatgcggctgcacctgtcgggctgtgctgaaagaaagtctgaaaagctgctcgtcggtcatgacacgtaggcttttgttgcgtgcttacaagtcactcgcaccataggaagaccagcacaggtgctattcggttgtcattgccagtctgatttcctgatcggccaacaaaacctttgatacatgacacgttatgttggtgttttcgcaaaaatatatagcacgtttgaggtagattttggatctagcgccgcttttgtcggacggggcagcttggacgtctacctgtgggccaaggtttgtctcgattttgattctactccagataaatatattccagaataatcagcactcgcagctcgctacagaagcaacaaccgagcgaaaaacacaccgaactggatgggacggcatacttcacctgaccagacaacatgcgctacgaaggacaggtagaacgatcccttcttcaatacatcccctgttcaattgtcaacaatttcggatcttctggatggtcgagcattttttcgatccagagaggtgaggacgctgaattatgtaccacatcgcacggggggattagaatctcaaccactttggtggcctaacgatcgtggctgatcattggttgggctacgctagttgtcctagcgaaaggaatgagtaacagcctttcctcgctgcccaacaagctccaccagctacaaaatgcttcatcgcgacggctgagcaatgtatcacgcgatgggtttgacagccatgggtgtcctttgtatgatctgggaaagaatgacaccagtacgactagggtgcgttcgaaatcgactaattttcagggtctccgtatcaagacgaatcaagtggcatcaaagtgctgctccatcgtcttggtttttgccttgcgagttgaagcgagtacttcctgcaatacccagttgttctctctcgccaatctgtatacaacccacccttctcctttctgagtgtatccatatagcagagcactcgagtccctcatgattagagtctggattcgtggacatcatgatgcgatggcaactttggaggcaaacgttttgtactacagtattattgtctggatttgatgtccacgcactggttcccgctgcccaggcgatgatcaagcaatacctggtcgctgatatcctcctacttgtaaggttgcatcctacaaggcttcctagcaaagcaacccagtacacctttgtgcggcctacttcgtaccaacgtgcaatcaaatccgaaagtcgcaatatatatatagaaatttgcaatacaaattttgcgactttcggatttgattgcacgttggtacgaagtccgcacaaaggtgtatagtatgctcttagttgactacagatggagcgctgggaacgaccgtgatttggatcgatgcggcaacttgctgttgggcctcgtggcgattcctgacgcgttcgcgcgcacgatccgcaagcatcttgagcttcttggtgacgaaggccttggctgcaacggcttgaagacgcgactgctgggccttggagctccagacgtccacgatgtcgtggacatacacgtcgctctcgtcctctatcggttcctggatgagttcctctacgatatcttccaaagttacgatgccctcgaacacgacgtgcggcggaatgggctggttgctgcgccagcacgaggccacgagctcaacttccttcgtgaccagcgcgatgtgcgagcgacccttctggaactcgttcagcatcgagtagcacgacccactgggcgacaccagaatgggcttacggagcaccaggtccctaatctgacgcgcgtcgtccgggttcagcacaatgagcttcttgacgaacagcaagcccacaatgttggacttgcgagtctcgtacaccgggatacgactgtggcccgaggccagaatgtccgccatagtatcacgatcgagcttggtatccatctcgagcatgtagatctggttcatggccagcatcacctccgccacggtcttggaggacaaatccagagcgccatggataatggtgacctcatccacattcagcttggtgcccgttgccatggcctgttgacggcgacgcttgcgttggtttggcgtctcgacttggacgtccacgtcgatctccgtctccggctcgggcttcaacagcggctgcttacgtagcgtgctaggcgacatgagcacactactgtgcgcgctgctggtgctggaggactccatctcgtagtcgcagaggcgcgactcgacgaagctctggcgcatggcctcgctctccctctggagcgccacgagcgccttgagctcgtttcgcttgtactgcgcggcgtcgtggtccgcgccgatccaccagtccagcagcttgctgatggggtacgcgacggggaagaccacggccatgagcaccttgacgccgggcgtgagcgccgcggcgatgcgcagctgggttggggcccgtgaagatggcggacgggatgatctcgccgaacatgagcacgcacgtgaccgacaggacgatggacacgccctcgggcacgagcttgtcgaggaaaatgggcagcgcctcgttggcgctggcgttcacgatgagcagcgtgacgagcagcaggtggtggcgctccagcacggggcgcaccttgcgcgcgcactgcttctccagctccgagccctccatctcgaggatgcgcacgttgagcatgtcgagcgacacgaggcccatggtcaggccggccatcaggcccgccgcgcacacgagcagcaggcagacgcagaggtaggtccagaacgacgcggggtcacatgacggcgacaggtactcgcatgcttcggcggtcataagcgggaggggcagggaggggcttgagagcaggcgcggggttgctgcttggacacttgggcggtcggaagccacttgcgctcgaggcggcgaattggaaagtgagaccaactcgccttgatactggggccccctgtctcaagaagggattaaatcggacttagtggagaagggcggaaattgccgcatgctagaaggctgtccacgctggaagagaatggtggtggcttgggtgagtcaacctctccgtatggcgactggatgtgatgtagtatcgcggcgatatttcaattatctaacgttgttgctctgcttgctttttatattggtggggaatctgctggagcacggggcgctgatgagtgtacggtacctagaggtctcgatggctcatggtgctaccgtcgacagagtatccgtcacgatggtcgcggagcccttcaacgtgggcaacgccgttatgtgaaagtacgtgaaagtacatgaaagtacttgtgcacgacgtgacgcggttgctgttgatatggtcggtgtttactgtacagtttactaacgttttactaacttgcttgttagtcgatgcggttgtcacatgaaaactcgcttgaatggcgcttgaagccattgtagctgacagcattactgtatactatagtatgaaagaactcgtggccacaataatgtatacagcttcatctttcaaataccaaaactagtaaagggaataccttggtgccctagatgtatgccaagtaacctaccggtagctatccttccgcgacaacgacttgtaagcgcgtgataacatctttatcatgctgctaggtgcgtaaaacgtctttgacgcatctttcagaagagctcgaatggtaaacccgcagcgtagcaagtattgcaaaacgtccagatcctcagtatcggctgcatccatcagacccctcacaaccgaccttgggctcacaattccggtcttgtaaagaaactcgaggatatcaacgctattcacaccaagcgcgtttagaaatgcttcgtcgacaacgtctgctgacatactgcccctcttgtgcaaaaattccaatgcttgaagcgagctacaagctgcagctttacggaaaatatagctgatcagctcgggaccgacgcatcccttggcgaacaacaactgcaacacaccgacttgattgtcgatggcctcgcactcaacgacgtactcggtagccgccttcacaaaacccttgacgatcaagtctgaagaaaagggattatcggtgtccacggatttcacttagtgaaggtttcccactgtagcagctgcaatgaatgccgcctccatttcttgaggcgaaacttggcactcttccattctggacagcaatttcagcacctcgacgtggtttctcgttgccgctttcacgaaagtagtatccaggcaagaagtgtccacacttcgaccaggcttggactgcaagaacttcatgatctccgggtggcctctagctggagcgcatataaaagcttctcaatctctctgcatcgtaaaaaagcttgaacatttccagcgagccttccttggtaagctacttttgaaaaaaaatccacccgaggaattaccatcacattcgttggtggaatacaggtaccgggaatttcgttgcgaagggcaaatcttggtctcataatttggaatttttttaaataggacaaaagaatctaaatcaggaaaaatctttgacgtttgccagccagattcgacgatgcatgacgaagctgccgatttgcgaccgacaaagcggctgaagggcgtccagctcccgcaccaggtccaagacttgccccacgtgatgaagctcattgatgaatttgtcatgtcagtctctgaggcgctggttgccgctgctgcgacgaaccaagtcgagtggctcagccgtctgctcgaccgaccagcactgtctgaccaagaggaatgtgtagcgtcaacggctacagaagttgctgcagcccacggccactgtgatgttatcaacttcatgtacagcagctgggacgacccggatttaacgtgggccagacagagctgcaaatttttcctgttcaaggcgatcgctggtggacatgtggctgcatacaagctgttgctctctttgtacggagatcgacttgtattgcttccggcgttggagcaggcagtgacattgggccagcaagaaattgtatcgaccacaatttccgctttgaatggcaaaggtgtcccgttggtggacgcacttttgttgacagccaaacatggagagcttaacttgatgactcgcgttttagacacttaccctcatgcagaggtattgggcccgctggctgcgtatcgtgtgatgttggaggcgtgctctcatggatatctcgatatggtccagttcctgaacgagaaatatggtcaacgactgtatacgcatgatggctatgacgcaaacactccagctgcacttgctattgccattgccaatagccacatggacgttgctgagtacttgtacgccaacaacggattcaacccgtccttcattgatcctgtgctgtcgagtgcaatcgacgctggccagctcggattggttaaaaggttcttcgacgacggactactcaatgggtcagagtcagtactcgggaaggcttttgtttgtgctgccggaagtgggcagcttgcaatcaccaagttcctgaaatcgaaatccacgttcggtattagcgatttcttttttaccgaagctatcatgaaagcggtatggtcggggtccttggaaactgtggagttcctgtatccagctgatgatcacctgatgtatccaggttttctcgatatagtgttcacgtctgctgcttcttcgggacaactcgaaattgtgcgattcttggactcgaaaaggcaggtctctcccgatctaatgcttaaaactttcatggagacgacatggaactgggttttagatggcaagaccatccccgatcaagtgggtgtcttggaatttttatacactaaggccggcgtcgcgcatgagatgatcagctacgctttcatggacgctgtacgcggcagcagtgtcgaagtggtcaagttcttgtacgagaagggtgatatttcggcagatttggttgacgaagcattccgttgtgctacatgtgaaatcagcgctgatgtcgttgaattcctctacaagactggcggtgtcagttccgagtcggttgggtgcgtcttctggaacgctgttgctgatgatgacgtttacgtgctggattgccttttcaagtgtggatgcatccctcaaacatgggttgaagacgtcttactgcatcatatttcaacatgcagtagcagagtgaagcaattctttcacatgaagcacaggcgataagagagcaactaacatgtaaatttgaggggaccgaaaaatggcataccttttgtcatgatttaatttgcgatttgtcgatgtgcacccgtacaagctgctgaaggctgtacaacttgcctggataaggctttcgtgaaagtataaaaaaagatattttagaaggcctgaagtggttgtctggggattgaaaaatcctactcgaatgattgctgttgcgaaagttggctacctgaacatggtcaacgttttggcgaaaaatcgttgaatttattgatcgaggctttaatggctgagtacactgttaaatgataatcacaacggagtagcacctgtgcttagtcttcctaaggcgcgagtgatttgtaagtacgcaacaaaagcctacgtgtcatgatcgacgagcagcttttctgactttgtttcagcacattccgactgctacagccgcattcgatcagacattctgtagtgtattccaggtttcaccttggtatcaccgcagtcatggacccgatagcgtgtcgctgctagcgacggtgaacccacgtgagccacaggtaagggttcgccacttcctggccagtcagacttcacagtgtctgtacctggtatgcggtacgattctacataccaggaacttgtatggccaactgcatacttctcttcgtgtccagaggccgttggacacggacccagttcactttgagatctatctcactcatgtatttgcctcgaaaggcatacacactagatcaatacactaggctcaacttcccagcggatcgccatccgccctgccgtgtgttggttcttccctgatgtgatgtcttccccgggattcactacacattccaagatatacacatcaccacgttctgctgcgatcaaaaacgctccttcgaccgactcagttctgacgaagccggtcttgtagagaaatttgaccacatcagcgctattttcaaggaccgctttctcaaatgctgcgtcaacgagatcgggcgatatacagcccttcttgtatagaaactccaccccttcgagagagctgcaagctgcggctttagggaaaatgtggctgatcaactcaggacggacgcatcctttggcatacaggaactgcaacacgccgacttggttgccaacagccccatacgtggtgttgcactccacagccgcactcaaaatggctttaacgtagaaatccagggaaacaaatattttgctatcgaggaatttcaccacttcgacgttttcgagggcacctgaaatctggtcatcctgctcaccggtatcaacagagctttgggcagggtcgaaaatgaagtaccgaggtgtcgccaaagcaacgttgcaagtacaaattgaagttgtagagctgcgtaggctagttgttgtggcgcttggtcaggtgaaggaatatatggaggatatacccaccgcgctagaagaagcattattacaagttgtacctgtaactttcaacaccaggcagataatcaacgaagacaccgacccaacgggtagatttttttttaatcgacacgcagtgctccgcctgaccattcttcgacaacttgtccttgtccacgcttccttcgccgccgtccagacttcgccctgaggctctgttgcccctgcgacgacggctacagccagagccgattcgcagagcactccctctccgccacttgggtccgaacaattcacacaaggacctccacggacaaaacggtgatcagcttgctagctctgcagccgtcgtcgtaggagcaactctgtcagccctcgaagtcgtggctccaccgagtgaagcaaagcggaaccgcgtcgcaacagggttatgagcccaggggctgcaaatagccggacgttcttttagatctccacccacctaggttgacatgaagtcgcaggacttggtcaccagccagcggccacctgcaggccttgggccataactctgtaacgacgcggttccgctctgcaccacctagtaaggaagacaaagccaacgcgacttcacacccagcttgcagatattagagtgagctcctcttcatgcagaccattcgtcatgcgtgtacttcaactcctttctcccatttgcttcttcgcccagacccgtgacctcactgtcgctcctgcgacggtcggtctccacagcattcgcctcaaggcttcacagccagctccatgcgcgaaacaagtcagacccggtgattggctcaagcaggtcttcctatccgctttgctatcatggtggcgacatgtggcagcccaattcgtctgttcaggctcagtatttggttcgagttcgctacgcatctcgtcgccgttgagcggagctccgtcccgtccgcaactcgtcgaccatggcgcccgagaacgccgcgtccccttccgagcgcttgccccggctcaacgtggacgagcacctcgagccggacccgaagtcgaccaagacgtcgtctccccaaaaggacaaaggccagcacctccaagacgagcctagcgacgacgccaccaaactctccaaggcccgacagttcctcaattgggtgcaacatcttcgcgagaccttcggcactgcgttcctcgtgctcatcacggtcgtgtacgtggtgcaaggcttctcgagcttcaccgcgctggccgtcaactacttcttcaaggaccatctgcacctgcacccgacgcagtcgcagctgctgcagatgctcatcaaggtcccgtggagggtcaagcctgtgtacggcatcctgtcggacagtttgccgctctttggctaccaccgcaagtcctacatgatgctgtgcagcgtcctgcagacggccgcatccctcactatggcggtgcccgacctcgtcacgacgccggccattgcggtgctcatgctcatgctgcagagtctgtcggtggctgtgatcgacgtggtgatcgacgctagagtcgtggagatctcgagactggaccccatcaatgggccgaatgatctgcagtccttgtcgtggatagcaacgtcacttggaggaatgctcggcgccttcctgtctggcccggcgacggacgatttaggcgtgcgtggggtctttttaactgctgcactgggtccgatcaccacgttgatgttctccatgactatggaggagtccaagagcacactgagcaagcgcgactttgtgtcttcagcgtcgaagcagttgaagcaactcaagactgctatttgcacccccgtggtctggatgtgcgcgctgtgggtcttcatctcgcacgccatcagtcctgcgtacactcaagttctgttcttcttctcgacggacgtgctgcacttcactccggagtttttgggcacggtgtcggccatcgggttcatcttcctcatggtggggaccatgctgtacaacatgttcttcaccaacgtgtcgttccgccgcatcttcatggccgcgcagctctgtctcgctctggtgtcgctggtggatgttgtactagtgacgcgcaccaacctgaagctcgggattccggacaaggccttcgtgctgggcgaccacgtggtcgcagacgtcatcggccgcctcaagactatgccgatcatggttctgtgcgccaagttgtgccccaggggcatcgagggcacgctgttcgcgctgctcatgtccatctccaacctctcgtacagtgtgagcgagttctggggcgccttcgtctgcgactggatggggatcacgcaggaccagtacgagaacctgtggctggccattgtgctccgcagcgcgctcaaggtcgtgccgatcttcttcctcttcctgatcccatccacggacccgcaggagatcatcgacaagctggacttcagtactccagcgcatacggaccaggaagacgatgaagatgatgaacactccgggacgatccgagaagatcacgcagtggacacgtgctcaccctcggaacaagtcctgctgaagggcaccgccggctccgtcgtttaactacactgtagttggacgcttctttataaaatgaaccaagagttaggataccatagtggccaccgtcgatatcccacacaaaacttcaccatgattgtacatgtaattggcatcacactccaagtctctgtatcttcaagcgtttataaatcaaatctttagcacgctacctacgctattgctactagaatcaaaactggaggcagctttcccttcccttgtcgaacaaacgtcacgccacacaccacctagaggattccgaggcaagctcgttggtacttgtcgtaccagcgcgtccgccagttattgatcgactggtcgatcaactggttcacgaagacttggcatgtgctcgtacgcgcgccaggtttgagccgtgcgcgtagcccctcgattaccgccttcttgccgccagcgaagcacggcaggtccgagttgcccacgagcatcatctccaccagtagcacgatctggtccatgttgcgacgcagagccaggtacgcgcggatgcagagcgtgcgaaagtagcggaacgacgagctgcgcgggccgcccatgagctcaacgaactcgtccgtgagcttgaagggcgcgcgctcgaagttccagttgctgccggggctgttggtgagcaggaagccgaagtcgatgtggatcacgtggccgtccgtgtccacgaggatgttgccgttgtggcggtccttgatctggaacacgtagcagacgatcgagtaggcggcgaggctctcgatgaagttccgctgcgctcgggcgaagccggtggtctccttctcaccgtggagacgggtgtagaagtccaggagggtggtgtatccagggtcgttgcgcttgagagagtcgagagacacggtgtccggaacggcctcgatgagaccagtcgtggctgacgtggcgatcacgttgtatggcctgtataaccatgcacaacatcagtcaatacgtactactcaaactaagcaacacaagcgatcagagacttacctcagtgatagaggaagggagtactcgcggaagatccgatcgcactgggcaatgagttgcgctgcgaactgctcctggcgcaggtcgtcgttgctcttgacgatgacggagagaagccgccagccagggtgatcaccgaacggcgactcacggcggacgcgcgcttccttctcgctccagcgctcgcggaacacaatcatcggcttttcgtcgtcctcgggcgtctctgcatcctcctcggcatcggcctccagcgcgtcagtgtcacccgtttccgcatcaggctcgtcatcggtgagaccatcttcaaggtcgaacttctccttccaagcggtggggtcagcaaagtcgaggcttacactcaagtcacgcggtcgctggtgaatggcaacctcctcctgagtgacgacgtcttccttgttggcaggaacggagggctccggagtgcattcaccttcagcactggtgtcttcgggagatgcggtcttattatcgttgatagcagtagcgtccgaggccttcaccgtcggatattgctctgccacctcagtcacgggcttccgagagaaccaagatgcaaacgaggtcgacttctccatcggcttctccaccggcgaacgttccggctcgcataccacattttcatcatcctcagaaaacaatccgtcgttggagtccgtatcctcgccatccgcatcctcggccgctggatcgtcagaagttcctgcttcgcttggctcaagcgaagacgccgattcagtcgttccatcggcagggtcggtgtccgatggaagtgcctcctttgactcggactcttctccgtcagcctcgtcagcctcaaggttgtccgaagctccgtcttcgctaggctcgattgatgaaactccatcgccgctcgcggtctccggttcaggggctgtttgcggcttcatcgagaagagggatccgaaaatgccaactgattcagcaggaacgacctcaagctttgctgtgccgcactcaattgctccagcacattcttcgctgctagattcgctcagcttcggctcgtcctcagacacgactacgggcttggctgcgtcggcaggtttcttcgaaaacaatgaggagaagaggcggccactctgagctggagtcgatgaagcagtcttctccgacatgtcagtcttttgctcgtcagcctcagccggcgcgctttcgttgttagtctccgtctcgtttggtcgcgatgaagcagccacctgagattgctgggcatcgacttccggcttcggctttctagagaagatcgaagagaaaatcccaccatttacgctgggcgcagcagtcggtggagctatctccttagccttagtcttctcagtgacttcgacatcgtcagtgactgcatcgccagtaggctcaacgtctactgggacggcatcctcagccgcatccacgtcaacttccttcatagcgctgtcgttgtcctcgtcttgttcaagcaccatgtccgcagcgttcggcgatgtgagcggcacctgaaccgaatcattctcttcgtcatctccttcctgcgccttcttcgagaaccaagacgagtaaaagctgtcgaactgaccccccgatctagccgacgcactggacgagtattccttgatgctacgacggcggggtctcggcaagttccactggccgagtcgatcctgctgctcttcttctgctctatgcaggtcctcgtcttcctggacgctctttctgggtttcctatcgccgtcctctttctcgtcatccccatcctccccatccagtacatcatcgccatctttctgccgcgtaatcgacgattccgtaaatgctgggacgttctcctcatcgatctcaggtagtggggacgccacgctgggcgacggcacgaagctcagctcgctctcaggcgacgtgctgcttgacatgggcgaatcatccactgggatgctcaattccgcatcggagttggtgaacgggagcttcaaggagaagactctggactggttgcgactggccttggacttcctccgcttccgctgcttcttggtacctgctttaggcgactgcaccgagtagtccagcacttctacacagaggaagtaaggcacgcgctccttagtggagaacgtgaagcactcgtcgacccgaatccccttgacgcggtggcacgagttgccgatcgggagataaataacgtcggagggcagcctctgctcctgtatctcgctcagtcctttgcgtagctctgcattcctgtttggtcgaggcgtggggatgagctgctccgccagatctgtgagtgcctcgacgaacttgggcgtctgtcggaatagttcgatctgctgtaagttcccctcgtccgtgcgcgcctcgtcctggatcgagttcctcttgctgagcaaatggccggcgaacttttcgtccgtctcgagcgtgtttgagtccagctcgttgtccgacgggaagatggtggatctcctgcgctgtaagttgtccggcttgacggccgacacctcctctacgcaaagcccgctgttcatgagcagcgcggggacgcccgcgcgtctgccgatggctgtgagcaggtcggagtcctcctggtcctgcgacgccgtgacgctcaggtactcggactggtactccctggcgtcgtcgcagaaggagcgcaggaaccacgttagtctgtgtgcgaagggcagcgagtcgccgctgcgggacatcaggaagcactcgagctggtgctgcttggcgtagttgccgtgcagcaggaaggtgcagagctgcgggatgtagaactcgagctcggccgcgttggcctcgtagctgctgtagagctgcgctaccacgtcctggtgcgcgtagagcttgagcagcaggtggaagacgtcgtcgtcgccgtcgttgtccttgtgctgttcctgttcgccccggagtcggtccatggcgctgcgcagcttctcgtcccagaagacgcggaacttctccacgttctcgcagtccggctgcgggtttacgagtagcagcgccgagtctcgcggcgtggaggacgcggacgacgtgcgcgtggtgtcggcggtgcccgagcgctccttggtcttgcgctgcggcctgcggaacacggagctgcgcaccttggagggcagcgccagcagcgagaagcgcggctcggacgagctggacgtgcgccagtcgctctcctcgtccgcgagcgcccagccctcgctctggttgtcgtcgctgctctcctcgttcacgggcaggcgcttgggccgctgcgcgggcggcggcatcttcgtggcccccatggagtagggagctctgggggagtgaatatatcggcctctggtggtgtgagtgcgcacggcctgcagtcttcaaggatgggtacgcccgcaggtcagtttttggtcgcaggtgcacctgtgtgcaacgcctgggcgatgcgcctgtcgcgccatagtgaaacccagtgtcgttggatcggggataggggagtaccattaatcaggtacttctcaggtaacggctggcaggtctttcgattttcagaccgccctgtatcggcggtggaatagcgtggagccatgttggcgacctcggggcggaacgagtgtcgagctgaaggagcccgttggggctggagctcgcggccgccttcacctgggcggcggggctgctcgcttcggatgggcgggaccagcttggcgtcgcgtctttccttccttcctgtgccgaggcgttgtttaccggcccaattgcagctgcaacgacagcctgcataagatagggcgcgttcttcttggcgtcaatgcagcgccgtggagccagcgccgccgtggtcgtcaccgccgacgacgccgacgacgttaatgcctcgcgctgggctgaatcccagacgaagcagcgctcaaagcggcgagatcgatttttctcaccgctccaatcccggccgcgcgcccgcgcggcgacgacgccagcagcggcaggcaacaacagctcgtgctcgtgctggtgaaagcaatgcgaacggttaatcttacccccaaagttttcacgcgcgctgatattcttcgcgggcgtgtctccagtgctgtcatctcgttactggcgacacactgcgtcgcgctcgcaacgctaacgccgagaaaacgcattgacgacagcaccgttggaaacggggaccaaattggactaaatatttagtccttctgcttcaaggacactaaaattggtccgcctcttttcatccaaccgcgtcgcttcccgtccatcattggtcgaaacccgtccatccccccgcttcaatgacctccgaccctcgcggtacggagtccacgcaccacgtggcagttcgttcgacttcgacgaggcaacttccatccttcggccttgcgccttgcaccttgcagtgccatttcctcttctctattgccccgcccgccatgatcgactcggtgcagagcggctgctacgcggcgctcatctcgctgatgctggcgtccaacttcgtgctgatccccgtgcccgtgcagctcatcacgtcggccgccgccatcgtgtacatcggctcgacgctgtcgctcaagctcaagcacgcgcgcgaggccagcggcgagaagaacgaggaggtgatgaaggccgaggacgcctacatgttcccgctgctgggctcgggcgtgctgctggggctctacatcctcttcaaggtcttcgacaaggacctggtgaacctgctgctgacgtcgtacttcgcgctcatcggcgcctactcgctcacggaggccttcagcccgctgctctcgcgcgtgctcttcaagggcagcccgcgcgtctttacgcacaacatgaaggtgccgttctacggcgtgtacaagctcgagctgtccacggcctggatgctcacgttcgtgttcgccgcggccttcgcggccgcgtggttccagaccaagcactacctgctcaacaacatcttcggcatctcgctgtccatcaagggcatcgagtcgctgtcgctcggcagcttcaaggtgggcgccatcctgctctgcggcctcttcttctacgacatcttctgggtcttcggcacggacgtcatggtcacggtggccacgtcctttgacgcgcccatcaagctcatcttcccgcgcgagttcgccaccgagtcggagaagcagaagaactcgatcctgggcctgggcgacattgtgatccccggcatcttcgtggcgctgctgctgcgctacgacgcgcaccgcgccaacgccaccagcagcgagcagagcttccccaagccattcttccacgtgaacctgttgttctacatcctcggcctggtggccacggtggccgtcatgttcatcttcaacgcggctcagccggcgctgctgtacctcgtgccggcgtgtttgggctcggcccttgtgacggcgctcgtgcgcggcgagttcaaggagctgctcgcgtactcggaggaggaggacgaggaggaggacagcgacaaggacgacaagaaggacgacaaggacgacaaggacgacaagaagtccaagtaggagagtcgaaccgacagttggtagagctatcgtaatgtgatcgtcgagattccgcttgagttgacgtctgtgcgtgtttgaatacgtgtggtagttgcccctgtagacgaacatcattcaacacgcatgccctcagccgtgaatgattcaccctagtgaacaagatgaatctcctggagaatccacagcaaactacatgtgatacgagcttcatagaccagcggtgttgaagcgtgcgtgttcaagtgatgtgggtacaatgcaattgtgtagaggccgcaggtctcccattccccaattgacctcaagctgacaagttcctcaaccggtttcagagtgcatccttccgcatggcgatcttcgtgcagaggtgttgctacgctgctctgctagcgctcatgctggccccccacgttgtgacaacgccggtgtccatccaagtcgtttcggccgcctgcgtcgtcgtgttcatcacttcgacgctcgctttggcggtcaagctgaaactcgcgagcggcgaggagaccgagatcatcaagaccaaggacgtcagcatgccggcactgcaggtcttcggcctggaactgctcctcttcatcgtcctcaagctgcttgacttcgaggacccggcgagcctggtatccaagccatacctcgcgatggtcggcgtccactgtatcgctgaggcgttgaactctctcgtctcgaacctgcacttcacgaacagccccagggtctacacatacgacatgaaggtgccgctctacggcgtgtacaaactcgagctgaccgcgacctggatgttcgcgttcgtgcttgctgcgtcattcacggttgcctggctgttgaccaagctctacgtgcttgatagtgcgttcttgatcgtactcgtcgccaagggcacgatggtggtggcggccggaagtctcaagtcgggcgttctcctgacctgcaacctgttggcttgctaccgtgacaccgacaccgcgctcgctatcctgttccccagctccatcctatcgctctctctgcggtacgactcgcaccgggccaacgtgatcggcagcgtcgctacgttcccctcctcgtccttctccgtgaatgtgctggtgtactgccttggcctggtgggcacgatgacggccatgttcctcctggacgccgcgcagtcaacactggagaacgtcggaccggtgtgtctgggcctggtactgcactacgtgataacaggcccagcgatcagctctaatacctccgtggacgccgacgacaaagccgacagcagcgtgcagtgcgccgagtcttcggagccaacgcgggcggcgcgtgttcggtagaaacaggtctgcgcggtaacacgcatgtaggtcagcgcttgcctcgtagacgaacaccttgaacacggtcaacgacactgtcatccatcaccacgctcaagatggtcctgggctgaagtacgtggcggttgaagcgaatgcatgcctcttatccgaaagccattccttcaccgccagcctcgatccaaagcgcgcagagcagcgcgggcaacggagggcgggcagacgccctagcgcaagtgatacactgatcttgccggtgcgtgctccctctcgccggccagaagtgagcctcggctcggctccgctcattcactgcgcacggattctttatcttctgcggctgttggcgctaaagaccaggcgagcgggcggctcagtctcagaaccgccgcgtggagagcaagcgcagtgatggccccgcacttcgggtcggtttgcctctgttccgctccggccgtttccctcccctaagtaccataacttaactgacagtctctgtgtgtgacgcgcgcagacaggaagcgagcccgacgacgacggcgatgaagcgcgccgccgcggatgtggccgaggagcagcccgtgcaggacgagctgctgcgcgtggcggccaagagcggcccgatgctgctgcacgtggacacggacccgggcgccgcgctggcgctgcgctcgggcgagcgctacgtcgtggaccacccggacaagcccgcggcggcggcgcaggtcgtggccgtggccgtggccccgtcgcccgcgcgccgacgcaagcgcgacgtgctgcgccaggtgtccatgcggctctacctcaagggcaagcacgtggccgacgacgtgctgcgcaacgtggcgcccgcgcgcctggccgacgccgagcaggtctgcggccacgcgcagtcgagtctggagcacgagatccgcaactcgcgcaagacgcgcaagcacctgtggctgcccaagacgcaggacgactcggcgctgctgggctccaccgcgagccccgataaggccaaccagtcggccgtgcaggagttcttcctctcgcgcgtgacggacccgacgtcgtacttctaccgcttccactacgacgactaccaccacctggcccctcagaaggccgaggtgcagctcgtagacgtgcagtggctcaagccgcacgaacagatcgtgagctgggagcgcgtcaacggcctgcggaaggccacgctgtcctgggacgcgtacacggagccgctgctggtggacatcaagaccggcgcgatcctggacggccaccatcggtacaacgtggccctgcagctgagactcaagcaggtgccagctgtgctggtggactacttgggggacaactctattcatgtggacgtctggcccggatgtggacgctcgcagctgaccaaggaggaggtgattgccatgtcgctgtcgcccgacgtgttcccgcccaagacgagtcgccacaggttcacggagagtctgccgcccatttccatcccgctctcggtactgcgccagcccccgatccccatcgaggagatcacacagactacggcgccagtctccaatgaagcgatgcagacggagacgctgcgcgcgctgcagcgcaagccgagtctccagcaagtgtcgatccgcctgatctgtggtgcccagaacctggccacgtcggtgaccaagagcctgttccgtggccgtctgcgctccatcgaccgcgtccgtgagaccacccggatggacttgatcaggcgaccatcgtacgacccgaaggacttcttcaacgccattcgcgagaacgacccgacgtcgagcttctgccgacagaaggccgcgacgttggaggacctgctatcggacgacaaggagcggcgccagaagttcttcttgacgcgtattgcagacccgacgtcgtacttctacaagtatcacttcgacgctcgcccgcagcgcctgcccaagaagctcgtggtgcatgtcgcgtcgctacgctggctgaaggcgcacgagcatgttgtgagctgggaccgtgtcgacggtctgcgtcgcgccaccgtgcgctggaatgcgtacctggagccgttgctggtggatgccaagaccggcgccatcctggacggccaccaccgctacaacgtcgggcttcagctgaagctggagtgcgtgccggtggtgctggtcgactatctcgaggatgactcgattacagtggacgtgtggccgaagtgcggccgcgactcgctcacgaagcaggaggtgatcgacatgtcgctgtctgatgagctcttcccgcccaagacaagtcgccactcgttctcggatgacctgccgcccatttcggtgccgctggagcgtctgcggaaggcgattgatacaaactacgttccactgtaggtattcatcgactcgcggaggaagagatatgaatttgcaagtatacttacatttggtgatgaattcgtggaggagggagagtgcgagagatagatgaaaagtcgattcaatagcacctgctgggtctagctacagccgccatcgcacgaacagaggatacgacaaagaggtactgctccaggatgaagatcgcgaagctcctgcaatccaagcttggctataaaggggacgctatgcgtctggataaggctttcatgaaagcagcattatgaagctttggtatgcaaagccagcaatccagttgattgatggcgaccatcacacagtcacctcgctgtgccattcttgaattttccagcgctcggacagtgtttttcacacagtgtttttcacggattatgggcgtcgacaagagcgacaccgacgctgagcagagcgacgacgagtacaacgagcttggcccagtgaaaggattgtggccttttggtggcgaggcggctccgacaatgtaccgattccagccggagctgcgtgtgttcgaatcagcaagttgctgtccaaggccaatgaacgtgctggcgagtatttctttgggggccgcgcaaactcactgcccgttgcccctggactatcggtggacggtgtcggccacatttccgttccgttggccgaagaatgcgcggtgaagttaatcgcccgggccgacaagtccccgttcggacacaaaatggagacgaagatggacgaaagcgtccgtaagagctggcagcttgagcccgatatcgtgcacttcaagaaccctcaatggcacagcggattagagcaattggtccagcttatcgctcagcggctaggctacccggatgtggctctgcagtgcgtattgtacaagatgttggtgtatggagaaggaggtcactttgtaaagcaccaagacactgagaaggagaacggaatgattgcagcactggtagtgcagctcccaagtacacatgagggaggagatctggtagtttatcgaggaggaaaggttagccaccgtcacgatttcggcgaggctgatcacagcagagtatttcccacactacgccgtgcactatgccgacgaagagcacgctctggaaacggtgactggtcctcgtgtactcgatttgcctaccgccagcaattcgccacctcgagaaagatcacgacaaactcatcagtgacgagcttgcaatcagcgatatgaacgctacaagtgactcgttcgcgctactgctgtcgcatgagtacactgagaagagcatccaagatatgggtgctgcggctctgaaaggcatggatcgagctcgattcagtgctttagacgccgcaaacgccttcgtttcgcccgaaaagaggctgttgctgttcattgcgcagctgaagcaaaagatcggtcggttataatgaaaactgcgaagggtgggaggaatgggcaaggacggatactctgttagcggcgaaaacctggggcgctcaatgaaagtacacaacatgcctcacttgcgcacgaagcagcggttggctccagtaaagctcaacctactgaatcccggacaagaaacgcttcatgaactatggaggccacacgggaaggacatcaccgcaggctgccttggcaacgagggcaacacgaaggacacaacgtactgccggtacgctgtgctcgcgtggcccgcagcccaagacatcgagaacgttcttaaactgaatggctcggaagtcgctgcaattacgttgcgagcccagaaacccgttgaagctacaaaagtccgcgtactcatggaagctatcaaggcagtgctgaatcagtatccgtggcctgaaccccaaacggtgtcgctggtattttaccggacgctgtgcgagttgctcgtggacgctggcgacccgacacttgtggaattgttcttcacgagtttttcgcgaagatgaaggggaaggactcgctagtggactctgtggttgtgatattacgctcattcaagtgggaagacgtcagccaaaagatgttgattgcattggggaaaatggatcaacaagacgccgtggtgttcgccctgcgagtgctagacgggttggacagcggaatatctcaaactgcaatgctgaaatttgtagttgatagggtttcagttctcactgctgacgaggagccccagagatcgaatgagcgtatgcaaatagtttggaaatgggccatgatctccagcgacaaaccttttcgagactttatcatccgcatttaagaaagttgatccgagcttgctgggtcctgccacgaattcagcgatccagagtgtggaagggctcaatggagaagatgataaatttgatgcgctgtcgtctcttgctggaatgaggatccagtggatgaggagcaggattcacgctcttgatacaccatttacgtgggagatgccaggcgcggcgttcccggaatgcgagcagatccaggcatttttgcgaggtcccgataatactatgactaccgagggtacctgcgagtttaagactccccaaggcgcgcaaaacttcgcgggcaaatggatgcggaagggaggaggtaacgcgtcgtttgaaatggatgcagcagaggagaatgagactccttttgtgacgatcaccaagacccgggagtggtatttgaagcgccaaacggagttggagaacttcaagagcgaattgaggactctagcgggacgctttaccggtgagacttccagcaagcgccctcatctactgtagaggcgtaataattcttagaccctctacttggtacgggtttttatttatttaaaaataaatatcttattgaaaccccacactgttgaacatgaaggctggaacttctagctctagaaggcacggaatcgtttcgagttgttagctgtcatgaaccagcatagtggagacttgagtacgaagccgagatcaagctttgatcgttgtatccgtttccttgttgctgcacgcaacatcagggtaacggaaacactgggactggaccactgcgaaccagctaaccgccagcgagatttgcaacctgtctagcttaaagcctgaaaaccacgtcacttctcgatacccaactttttttggtagtctgccagtacacgaacgtagatccttggttaccgctcgtgtcgtcttgcctgttgcgtgtaaacccaactcgttgtattgaggcgtctcctgcttgaaaatgaagtctaaagcgtagcgggcatcgacaccgcatacaagtcctcaagacttgctttaaaacgaatcggttcatcacttagtgataaagtttagcaaattaatcatggatcgctcaccccacgccccaatatggtctacttcaaggtgtagaagagcagatctccattttgatggaaggagttgtagaattgtagtaagctgcaggttaattaagctggcagctgagtctctcagagcagcgaaacacggttgcttggcggcgagcaacgaaaacctcaaagtccacaaatccacacattagttttgcgtcttctactaaacgctgtcactaggcaggaactcccaacgcaatcgagtgaatccaagctgcaacaagcaagacgtctcctttgcctcctgtcttcaacactcgcagaagaagaaaaaaagaagttgcagtcctaatcccgcacctgcgtttacggtttgaatgatccaaacatccgactagttccctggccaatccgattgcggtatcggttttccctctggctccagagactccggggcgccttcttccgccacatccaaaactccccacggcacgcaccgagtccccagccatggcgtccatcgcggcctccccaggtagaatacccctcgccccgcccccgcctatcgcccccccccgtcctaccctccatcactaacccccctcctctttcggcccctgcagcagtgtaccccgaaggcctcaagaagcgctcgcgcctgggcgagtcgttcgagctgtcgaggaagaagcgccagcgccgcgtgggcgagaacggcgcccaggacgacggcccggacgaggccgacgtggccaagtacagccagcgccacgtcgagtactttgagcaggtgaagcaggccgagatcgcccggataagggccgagtacgagcagttcatcctcaagaaggaggccgagttccgccacgagacgcagcagcgcgcggcccagcaggccggcgaggtggcccgcctccagggcgagaacaagctgctcaagcgcgccgtgaacatccagaacgagcagaatcaggccatggagcaggagaacacggcgctcaagcagctggccacgcaggccgccgagcacattcggcgcctcgagcaggccaactacacgctgcgcgtgcacctgcagaccagcaccagcgccggcctgggccaccagcagcagccgcccgacgtgtactaggctggccaggcctctctatagacaaccagccagccggccggcctcccgttctactactattcattattctatgggctggcgtcggagcgtcgggaaggccagagctacaagggacgccaaggccaaggctctctctctcttctccgccgccgactgcgtatcattctgtgtatcgaccgattcccctggcgttggacgtcctcagctcagctcaactcccgagttcctggacttggagacatgaggatctacagacgagcgagacgacgtcgagggccggtggaaggttctcgacgtctgcttcgctgtcgtcttgtgtcgttgctccgttgttctcgagacactcggaacgagctatggcccggccgcagaggagaacaagaaggttccagcgcttcctcgcttacattatttccgcaccaaaagctttaacgccacaaacatgccatctcattgatgcatttccattcattgcattccttcgtgtacgtacagtactgtgtcatgtgtctctaggccgacgccttcctcgagcgtcgtttgttcttgggtgaggtcggatttgtgttcgccttgggcttctcgtccgcgtcttcctcctcgtcttgggcctgctggaagtcctgagtcagctgcgacgccgaggccgcgcgtgcccgagcgatgtcctggaacccgaacatggcgcggagctcggcccggaagacgaacgcgatcaacagcatgatcacgactgcgatcccagccgcgatctgacggcgctcttgagcggcgttgtactcgtcgatgtgagcgtagcggttcttgaggtggtacggcagctcgaactgcgagcgcttgggccagatcgacaggaagagctcgtgcaggatctgactcaccgccgcggacgggtgcttcatgtcgtcgttgatgcagacgaacttggttcggcgcgcgcgcgtgcccatcatctgcttccaggcaaagttgtagttgtcgctcagcatgtggaatgtcacctccgtctccggcatgagctcgaccttggtttcgtaccgaacgttcttcactagcgcgtctcgcactgaggggcagcgctcgaggttctccagcgtgatgtacggcgtcaaggtctcgctcagacgcagcgttccttcggccgtcgggatctcacgcaccttctcgcgcttctcgggctgcacacagtcgcggacttccttgacaaagtcttcagggggcgcatcgccatgggcgagactggcagccgtcagaacctcgttctcgtccaggatgccgttgcggttcgcgtccagatactcgcgccagatctcctccagtgtgtgcgggtggatcttggcgcggttgatcaggtagtggaagtacgagaagctgaactgcatgtcttccgggtggcggaagcggtgggccgacgtgtcctgcacctccttggtccagtggtccttgatttcgcggataatcgacttctgcagcaagaacggcatgtgcgagggcacgcgacgtcggtccgatgtcttgggcttaccaaacgcgcggttgtacagcttattcacaaagcgcagcgagtcgccgaacgtgtccttcgacaggtgagcctgtgcactcttgagcgtcaccgggggcttctccttcacctcctcaggtgcaggcccacatacatccgcgtactcgatgtcatccagagtttcattcgtggggacgacatgtccattccccacagcggatttaacgttagtgaagaaacggctcagcttgcccaaaagtccctcgcgagcttgagcctccagttcctccttttcgcgctccatacgctgagccaatcgccacttctgggcttcgcaagccagtcgacggccttcttcctccttctttgccttggcgtcaacttcatccttgaccggaggacgcgggactggcacttcattcgggtagcaaatgcgaggccgaattccaataagccggcgagaggtatcaatgcagcggtcgagcagttcaatcagagccggatcgccccccatgtacggcgtgtagacaaccttcggcttcggcggatgcagcagcgcccaaagagtcggcttgtgcaccacctccacctccttcgagtgatagtggcccaaggctagagcgaagcagtagcggtatcgccaaggatcagcacggtccgtgtcgtagaagcagacctggccgtcagtcacctgcggacttgtttcccacgtctccatcagcttctgcacttcgctgctatccacatcagtttcatcgtccttggaaggcgtggtactttcatgggcagttgttggagcctcggcctcactttcgtcttcttcgtcaagagcaccagcaaccgagaacaccgtgtgggcgtggtttgtcagaacacgcacggtgacgaaaattccacggttgtcttctgctagacggcacttggttacaccagtgttctcgttatcctccccctcgttttccacattgtcctgctcttcgctgggcttttcaccattcgccttctcggtagaatcaacggcaactccatccttgctgtttgcttctcccgtagaagatccttcaccactgccagtggaaatgacactgtcctttgtttccgagttagcagtctcagccgcagcaaccaccggtttcttcttaggaacgtgcagctggcagacatcgtgatcactccagtcgacatccttttcgtcgttgtgcagcctcagatccagttgccagccaaggtttagaatctctccatcttcgagcttctttcccgtaacattgaaaggcaagaagatttcaatcatcggcacctttgcggccagcttttccgcaacagcagcgatttgctcatccttcgacaagtccgaagtgccctcctcggatccttctgcctgctccacatctgcgtccttctcgttaattgggaaggcgttgcggaaggtagcttgtcggaagccgaaagggagacggatgcggtttggccggacgctcgtgttcaggaacgtagacacgccaccagaaatctcttcgctgccttcatcctccacagggctcagagccgcctcgatagtattctttcctctcaccatcgagaagtcaagctgaataggagttccttcagcgtcctcgccagtaacagtaatctgaacactgctcgtcatcaggcgcgcctccgagtcgcgaccaaacacgagcaacagcaccatttccgtctcgtagatcgaggcgaagcgaacgagctcgtcattatcgtgcgcggcgctcacgatactcccattaacgccaaaggcctccgtcaggttcaggtacgtcgcgttcacattcagcggcacgtgcacgagcgtgtggttcgcctccacttccgccgaccacaggtccttcaccagcggggacatgccttcctcttcctcgtcatcatgaacatacggcctgtttcggtcgtagggcttctggactctgcagtcgcctccatcaaacccacaagagctaacattgcatgatcggtcacacactccgttgcccaagaaggagtaatgacacgtccctaagcacaaatggttgccaatcttgggcggcttgggcgagtgctccagaatactggcgatcttctcctggtcacacgtcacagatccatccagcgggttcacgtcgcagccgcagtcccccatgtcgaagtcgcaggccgtgacgttgcactctttatcacagcggccgttggccagactcgattcccagcaccggttggagcagagcgggatctcccacgcgaagtaggccttctgcacaccggcctggcttacaaagtcctcgggccgcacgggcgaacccaggaacacgtcgtcgttgaagtacaggaacatgtcgctcaggccggggacgttgtccaggttccactcgatggccggggacgagaagaccggcaggtggctctcgttggcgaagatgtcgcggtgcttgacgatgctgatcttgggcgactcgatgtcgagccacgacgggatctggccgtccgtgaccacgtagatgtggcgcacccaaggtgcgtatttctccagcgagcgcagcgagtagcgcagctcctcgttgtcccggaagcggttgtccgagttggagtcgtcccggcccttgacgttggcctcctcgccccacacgggcagcggctggcccgtgagcgacgcgatccagtgcttgtgccagaactccttctccttcttccagcgcgggtccgtgccgttcacccacgtgtacacgacgtcgatggggccgtacgagaggtagtccgaggccgtgacgccgccgatgttgttgcggtccgcaggcgtccagttgagcaggaggagcgcgcagcagctggccaacacgcagaagggcaacaggacggaccgcaagctgcaggcgcgacctgcaacggggccggccgcgggctccgacgcggcgcgccgagaacgcgacgaggccattacgtgtcgggcttttgtctaattaatatctggcgagtgaagtggtgtatttcatgagcgtacttaagagagggtgtgagcaacgtaaagtgtacatacggacgtcgaccaatcagattcgttgttcgttgcggcttcaagtatgtcagctgagagtcacgagtctcctcctcctctaggagatgagatgaagtttagcccactaggcaagtacatcaagttgccagttcttccattcatttggtgtcgtggacgagtaggcgtatggtgtctgcagagagacaaggctaagtacctagccttgagtcggaggcaacgacttgcaagcgcgcaatagagttctgcgcgttctaattgaagtgtacttgctttgggcgttctccagcagttcccgagaaacgcagccgaagttaatcatgcagtccactacatacacgtccccgcgatcggctgcgtccagtacagcacaacgaacagactcagcgccgacacatccagtcttgtacaaaaactcgaggacatcagagctgatttcttgggccgcgttttgaaacgctgcctccaccagatccggcgaaatgtcgccgttctcgtagagcacttgcaccgctttaacagagctgcaggcggcaacttcggggaacatgtggctgatcagctcgggactcacgtatcttttggtgtataagaactccacacgccggcttggtcgtcgatgaccatgcactctcaatagccgcactcataaagcccttgataatcaaatcggggtaaacgaggatcttgctacacaggaactttaccgttttcaggtctccacgtcgcgctgctgcaataaaggcaacatcaaacgtctcgcgagaaatctggcacgaacctacaagctttagtcactgcaggaggctaaacgtgctgaccggtgtacaagctttaatcaaagatccagactatatcttgggtaccaccatttcttggcattactaatagtgcttttttctagtgcttgtcgcttaatgcaagttgggtgagagtcgatagcgaattgcttctcctgcagggaagaaagcctggaagcgtgggcttgacagctactacttttctacgggtcctcgggcttaggcacgggcttgagttcgaagtcgtccagctgcagcttcttggtcattctctgcagccacgacaacaacacattatcaccaccaactcacactattcgcagtagttcagtctcatttaatgatcacaagtcatcgccgcaccttgtgctcctcctccaagttgaacatgtgctccgattggctcttgaccaagtggtctctcgcctcgtacttgccgccgacgaactgtcagagccgcagcaatagccacacagttagcaccaatcaaccattctcccattgcaacacccctcttctcttcggcgctctacgtagtgctctacctgcgtcagcgccacatatccgcccacaatgaagagcacgagtgggagaccggccgtcgcgaagtggttcttcttcttcttgccgtgcttcttgggccgcacagacggcggctgctgcttggtcgccgcggcggagaagcgacgcactgcggtccggagcatgcttcaataggtagaacggtagaacgggtagagcactttgctattgctgcgcgtgtgcagaaatgcatcaaaaatgtttgagccccaggttttgcggtgatttgattggatgatgataccatcgaccaatccgatgccgtcttcaagagctcagcaattgtggggaatcgaacggcgcagcagacatggccaaggtgacgcccaagcagtacttcgtcctcttcagcgcgacgctgggctcgctcttcgcgggctccagcgccatgcacgccgtgctccagcccgacctggtgagcggtgatttattaaccaagtctacatagagactatgatactgattgtgtaacatcccaccagaccatccccgacctgagcgacgacggtgccaagcagcccaagaagaagtagagagagagatgagagacagaagacgtcgcggtggagcttctaaatagtaattttaccgactacgggtgtgagttgagccatgatcgtgactcgccgagctcaacgatgctggtgttgttgctgctgtcgacgctgtttctgctgaagtcgtcgctcctgccagatagcaacgaaagacatgcgattgttagtggacagttagcagatagacagttgacagtgtatcgcgcaccttttcctgctcgcgcagctcgttgagtcgctcgcgccgtctgcgcatgacttcctcctggcgcttgcgctcgaccacctcggggagttggcggtacagtcggcgactgcgctccttcatctcacgactggaaatcttggcgcggctaccgctagctaagcggtcgagcagtagctgcttttcagggggtagcggatccgtagcacctcgggaacgagagtcttgtacggtggtgtcgctctttggagcgggcttccgctcaggttcacgctgctgcagcagctcctgcccctgctcctgttcacgctgcttgtttctttgccgcttcagcttctcgcgatgactttcagcgcgtcgaccgaaacctgggtggcgtcgttggaaagactcagctaatgacatttccttgccctcttgaccatcgttgagcttctgcagtggtgctgggggttgactcatgtcgagggagccaagtggaggtggcggtaaccgcgacacctgttccttgatctcctcgagtgtgaattgcatcgcttgttggcctctaccatgtcttggtatctcgctgtcgctgctttcatccgaaactttgcttaggtaactggaagcaagagactgctgggaacggttatcgtgaacttgatcatccaaatttcgctcaatgggtggcgaaacatgctgttcttccagcagggactcgctcatactcgagctcgagcgagccatgctccttttatcggaatgaggaagcctctccaactcttcgttcgattctgcaacgctcgcgcttgacacagacgacgccgaccaagcaattggcgctgggggcttggtcatatccttcatgccatgcatcatagcaggcaaccggagatgcagcggcaacgagttgtctactgccgacgtcatcttggcgagggagttgatattagcatccatcgacaggctcgagctggacgcgaaactcctttcggacaagttgcttggatcatcctgttcatcgtcagatacacctcgccgctgctgtaggctactgtgactgggcacttctcgtcggcctccgtcttcattccgctttcgagaaatgccagctgcaaggttcaattggaccgcaaatccgagactagaaacacccgatgcactcgagatatccgaccgatcttccaccccactagtatcagagaagttgggcttctgttcggtggtataacgtcttggagtgggcttccgctcaggttcacgctgctgctgcagctcctgctcctgcaactcctgctcctgctcctgttcttgctgcttgtctctttgccgcttcagcttctcccgatgactttcagcacgtcgatcgaaacctggatggcgtcgtttgaaagcttcagctaatgacatttccttgcccttgctgctttcatccgacgctttgcttaggtaactggaagcaagagactgctgggaacggttaacacgaacttgatcgtccgaatttcgcccaataggtgccgaaatatgctgttcttcaagcagggactcgctcatactcgagctcgagctggacatgctgcttctatcggaatgaggaagcctctccaactctgggggcttggtcatatccttcttcccgtacatcatagcaggcaaccggagatgtagcggcaacgactttcccactgccgatgtcatcttggcgaggtagttgaaatgagcatccaatggcaggctcgagctggacgcaaaactcctttccgacatgttgctttgatcatcctgttcatcttgagatgctgctgatcgttgtggtgggatgctataacttggcacttctccatcaccgttccggttccgtggaattccagctgcaagattcaattgggccgtaaacccgacaccagaaacaccagaatcgctcgaaatatccgaccgatcgaccgccgcactattatcagccaggttgtgcttcctgcttccgcgttcttggcgcgcaccacaatctcttccagtgtctgcctgatggcgtactcgcggttcctccgctgaagtatccatattctctgcgtccatttcataatcgaaagagtccgagctgctggagagacttggccgtagagaaaagagcaccttctgctcagatcgagtcgatacagcactgacctgaacgcccttggatgtggcttgatttcgcgagctttctgttgccacagcttgatgagcttgatgagctacacgctgtctgctccgaccaaaagagctgcgctgctctgccgtcaacattctgctcatgcttggcgcatccagctgtacgtcatactcctccagcgcttgactgtcgtcttctagagaccgttgaggtcgtggttgagtacccttagggaacatcgggacgagttcgttaacgaagctgtcgtccccatagccagggtgcaagctatcgtcaaatgaggtctgcgtgtccgaaggcggtagcgagtactgggcgatggacaccgcagaagtactgcttctccgtgcatagtgatcaatttgttgccgatacgggtcgtaagggtgcgcatcgttgcttccgatatcggggtgatgtatgttggtctcgccttcgtcttcatcatcactctggactcgggggaaatcctgcggtacttcagcaggatacgctggtaacgaatcctcctccacaactcgcctctctccacgcacacattccctatcaagcgagcttgtatgaccagaaccttgtcgacatacgccaagacggtcgacctcgtcatttccccccaatcggtgcgcatcgttgcttccgatatcggggtgatgtatgttggtctcgccttcgtcttcatcatcactctggactcgggggaaatcctgcggtacttcagcaggatacgctggtaacgaatcctcctccacaactcgcctctctccacgcacacattccatatcaagcgagcttgtatgaccagaaccttgtcgacatacgccaagacggtcgacctcgtcatttccccccaatcggtgcgcatcgttgcttccgatatcggggtgatgtatgttggtctcgccttcgtcttcatcatcatcactctggactcgggggaaatcctgcggtacttcagcaggatacgctggtgacgaatcctcctccacaactcgcctctctccacgcacacattccctatcaagcgagcttgtatgaccagaaccttgtcgacatacgccaagacggtcgacctcgtcatttccccccaatcggtgcgcatcgttgcttccgatatcggggtgatgtatgttggtcttgccttcgtcttcatcatcgctctggactcgggggaaatcctgcggtacttcagcaggatacgctggtgacgaatcctcctccacaactcgcctctctccacgcatacattccctatcaagcgagcttgtatgaccagaaccttgtcgacatacgccaagacggtcgacctcgtcatttccccccaatcggtgcgcatcgttgcttccgatatcggggtgatgtatgttggtctcgccttcgtcttcatcatcactctggactcgggggaaatcctgcggtacttcagcaggatacgctggtaacgaatcctcctccacaactcgcctctctccacgcacacattccctatcaagcgagcttgtatgaccagaaccttgtcgacatacgccaagacggtcgacctcgtcatttccccccaatcggtgcgcatcgttgcttccgatatcggggtgatgtatgttggtctcgccttcgtcttcatcatcactctggactcgggggaaatcctgcggtacttcagcaggatacgctggtaacgaatcctcctccacaactcgcctctctccacgcatacattccctatcaagcgagcttgtatgaccagaaccttgtcgacatacgccaagacggtcgacctcgtcatttccccccaatcggtgcgcatcgttgcttccgatatcggggtgatgtatgttggtctcgccttcgtcttcatcatcactctggactcgggggaaatcctgcggtacttcagcaggatacgctggtaacgaatcctcctccacaactcgcctctctccacgcacacattccctatcaagcgagcttgtatgaccagaaccttgtcgacatacgccaagacggtcgacctcgtcatttccccccaatcggtgcgcatcgttgcttccgatatcggggtgatgtatgttggtctcgccttcgtcttcatcatcactctggactcgggggaaatcctgcggtacttcagcaggatacgctggtaacgaatcctcctccacaactcgcctctctccacgcacacattccatatcaagcgagcttgtatgaccagaaccttgtcgacatacgccaagacggtcgacctcgtcatttccccccaatcggtgcgcatcgttgcttccgatatcggggtgatgtatgttggtctcgccttcgtcttcatcatcatcactctggactcgggggaaatcctgcggtacttcagcaggatacgctggtgacgaatcctcctccacaactcgcctctctccacgcacacattccctatcaagcgagcttgtatgaccagaaccttgtcgacatacgccaagacggtcgacctcgtcatttccccccaatcggtgcgcatcgttgcttccgatatcggggtgatgtatgttggtcttgccttcgtcttcatcatcgctctggactcgggggaaatcctgcggtacttcagcaggatacgctggtgacgaatcctcctccacaactcgcctctctccacgcatacattccctatcaagcgagcttgtatgaccagaaccttgtcgacatacgccaagacggtcgacctcgtcatttccccccaatcggtgcgcatcgttgcttccgatatcggggtgatgtatgttggtcttgccttcgtcttcatcatcgctctggactcgggggaaatcctgcggtacttcagcaggatacgctggtgacgaatcctcctccacaactcgcctctctccacgcacacattccctatcaagcgagcttgtatgaccagaaccttgtcgactgacgccaagacggtcgacctcgtcatttccccccaatcggggagtgtagagagattcatgcgctttgtaatcaacgtccgctttggcaactttgtcaccgtccgagtgttcatggtctgtatcgcctaagccaaccgatcgatcatcatccgtctcaattgaaaatgccgacagctcaaccgagtcttcatctagtccaagcatccgtgcaaatgtcttctccgccattctgtcaggatcatcccccattccacccccatctccagtatctaacgcgacatcctcttctcctccaaactccatcccgcgcgcacgtctctccattttatccaccagagcaagccactccagcgcctgttgtccttgctgcctcgacgtcacatttcctagagctgccttccctctgtccgcagccgtctcctcctgctgctccactaccagcctgtccctctctcttctcctgtcctcttcctccctgtacttgtcagcttcctgccctccatgcagcgccgtcgggtgtcgtctattatgtcgaatgaccgtcaccgccggccgctccttctccatctccaccgacggcaccacgcagtgtgtcctcgtgaacctgtaggcctgcacgtccttcgccttgggcctgggcgtcacaaacacctcttcggggctatgctcccttctcaacctctcaatctcctccctgtccttagctcgctgctccaccagctgctgctcgtggcgcgcgcgggcgctggcctgccgtctctgctggcctgtcagcaccctcagtctctccacgttctgctccacctggcgccgtctctccgtcctcttcttctcctcttcctctctcacctcccgcgcctcctgtaggcgctgtttgcctgtaacttgcgcgttgaacgcccacttgtggcgctcgtcgtgcgccgtctccatgagctccagcagcttcagccgcgcgttgcgctgcgccgcgcccatgctctgcagcgagctctggtagcgcgcgtgcagctccgtcagcatcttgtgctgctgcgcgctcagctgcttttgggtccggtcgctcttgccgcgctgcagccgctgcaggttctggcggtagcgctgcgtcacctgctgcgccagacgccgctcctggtcgcgcacggccagcagccgccgccgtcgacgcgccgcctcgtcctgccgcgagtacagctcgatctcgcccgagctcagcgggatctgccccagggacgcgtcgcgccggcgccgcggaggagcgcgcaccgccatggtcgaggaggtgtcttggaagtggtttgaattatttaatagatgggattggaggaaattaataccttgttggagacgaagtcccccctataatcatgcgactctgatttagtgagtttttacgtctcttatatacactcctctttactttttacatcaattctgcacataaaaaggttttatcgaaaaattctgatcagctcgttacagtcaaacctttttatatgaggccctgttggtgaccatctactacaatgactcatataaaatggactcagttaaaaaaattatgtggtgcacgtaaagaaatcgtgcatagttcgctgccgctttgccttcaccgtagtctctcgaaccaaagcggtcacggtctgtaaagctcttcgttctctgtcagtctgctctccgcattgcagcagaaatgcagccagctccatgcagtgtctcagagcaatggcaggttgaactgcgggttcctgttcctcctcttcctcctgctcgtcctgcgaaactgcatcacttcctgccgcttcgtccactagcacatctggctcgtgcacaggaacgtcttcgtccactacccgatactcactagcgctaacagcgccctcccacctcgatagcatcgccgttaactcctccatcgcgttgctggatacctcctcaatgtaatccgtgtcagcacgggtccttcctagcatctttcctcccaaaatgcgagtcttgacccagcaatttgtaattgtcgttggcgtcacacccgcccaagcatcaatggaaaattggacagcttccagtacgttgagcttgcgtgtaatgttagcttcaagtgcatccaaacaccaccgcacaaaatactttcggtaccgagccttgaacgacctgataatacgtgaataaaaaaaacaccgtaatagagatggttagtataggctaccccacaatatagataaaatatttacctgcatccagcggctgtacggcggatgtcatgttaggagggaggaagtgaacagtcacatgagtcaggttttgtagaatcttgtggcatgaagcattgtcgactagaagtaggaccttgcgattggcggccgccattctcatgttgaagaggtgcagccattcgtcaaaaatgacggatgtcatccaggcgttcttggaggacttgtacaatataggtttacctttaatcgccgctccctttttaaagcacctcgggttcttggccgtaccgatgactattgggtcgagcttgtcggagccagtcgcattgcagcagaaggccaaagtcaaacgttgcttctcctttttcttgcccttgcgaatagtcgtagctagcgctcgattaggcgctaagcgatagaaaagcgccgtttcgtcgaagttgaacacattctcgggtgtaaactgcgccaccaactcttgtagctctagcctcgcatctctcacttcatcagcttctacaccgccaccttcgccgtgtagcgtatgggagcggatcccattgcgctactcaaagctttgaagccagccggtgcttagccggagctgcgtggcatcgatgcgtaagcgctccgccagctcatgcgccttcagcaggagctcgtcgtccgccatcgccgttttagcttcgttctggaagaaaaaattccctcagttcccgctcgaactgagggaatttcactcggcgccgcttggtcgcactcaggtcgacgtggctgaagtaggaagaaggcaggttgcgcagtcgggcgagtgtggcacggctgacccgggccttgaaagttgcgtagatccactcggcgagcatggggttgttcatgccaggattctgcttgagctttatgtgcacttggagcttttgttctagcgtcagacaggtgcgaggagacatggcgagcgaagaaggcttgcggcaggcgttgagtgttgagcagtggtgctttgaagagtgtgtggccgtgagcagtgtgaatcaaataaacaggtgagacctaatttggtccccaaaaatgtgactcatataccttgtatgcatataaacagagatcatacaaaaactaagtgaaatatttggtagcgacaaagcctgcatcaaataaacggcatggctcaaatagagaggatcatataaacaggtttgactgtagtatcattattcggtactttaataacgtgcgaaatcgtcgtgataaacgtctaggccaaaaccagaattaaaactgatctgtgtccggtgaaatgtgaccccaattcaaaaatatactgctttcagtaacggggttacatggaatagtgaccctgtcactattccgggatggctacgtcggtcactcccctggatagtgacccaagtggcctaacagatacattttgtatgacacaaaccatagggaacttaggatttgtatgcaggccaaatctgtaccaacctataaatacattcagtcttagatctaccgcttttcaagtcaagtcgtccccttcagaccagggacacgtgaacggctgttcacttggagtttgtatactcctgcttcctctgttaagaagtgctgtgtgccccgtcacattcagtatgaggcctggaacgagacaaacacaactaggacaaatttaatgaaacaatctctattagtaaagatatcgatgggcgggaaaggtcgcatcgagcaacccgcttcatctttgaccgcgctcgcgcttcttccagcagggacgatgtccggcccagatgcgcgctccttgtggcacttttcgccgcctcgcagacggaacagcgttcgctacaggccatccgagacctgaggcggaggttgcacgacgaacggagacgctgggagtggtagcgactaaccagaatgcggcactacatcacgatcgactgtctgaaggagcctgagcagtccgcgtggatggacacctggcttaaaggaaccgatgagaatatgataactgtgacaagcctgtctcggtaaggaagcttgctgtatttggtggattaacttatctctaactcctttgatctgcctcagtgcctcgttcaaccaactcttgtcgagattcgtgctgtactacgagattcctatctacagtacaaaaggtggtcgccctaggaagctccagcaccaccatcaggtgctgggcttgttgttggcgttctacgtaggttgtgagtaccgcggacgcttgtgcttgatgttcggggtgcctcccacgcttacccgagttctaaacgcggccgaggatgcactcgcgtcggcattgtgcggctttgcgcccgctcggattgtgtggccgtcacttacaaggcagcgagcgcttgctcagctcgtggcagccaaagagcccatgctccagtttacctgggggttcttagacggcaagaactacaaggtatttacatcaccgtttgtattcgcttgatcgaattgttatctaactacacaggttgtctaactactgttccaggtgcagcagccaccgggccgcgacattcaaaacgcccactacaacggatggctgcatggtgtctttgtaacaggcacactatgcttctcggcggacgggctaattgtctgggcgaagcacaactgtccaggctcgtggaatgatggcggcacgagcctggacttccgccgtaagctagcatcacgagagctaaaccccgacgaccgctacggggtagttgcagacagcgctttcccgtgtagcgctggaatgaccggcaaaattcttacgcccttgaaggagggtgacgcgagtcgtctggtgccttccgttcgtgcagcagcaaaggcgttatcaggagcaataacatctatccgccaaagcgcagagtggggaatgggctcgatagaaaaggtgtatcatcgtctggtgattccgctgcctttcgataagaacaagcgccaacagcgcctggacaacatatttcggcttgccaattacagggtgcgtactgttggcatcagcaagatacggaccaccttcgttcgtggcaacgatgacaggagatacaacaatctgcactaagcgagagaaccgatattactcaagatgtaaaactcaacacgttccttcctacacgttctgtgctaaagacctcagctacttgttcttttgcatggttgaaatcagcatcatcatttgctcgtagcgttgccgggcttcagcacggtcttgctccagacgagcttcgaactgtcgacgtctctctgcttcttggtctcggcgttcttctcgagcagcttcttctttcttcagttcgtcacgtcgaatggtctcgcgttcttctcgctcccgcttctcgtctgcgcgtcgctcttcacgttcttcgcggcggcgtttctcctcggcttcggcacggcggtcagcgtcttcgcggaaaaataaaagcaggcctttcatctccgtgcccgtagacgcgtaagcagtctccgctcgcttaaggtctctgtcgatagcgtccattcgcgctttggcgcgcgttcgtttggatgctgcatacgtagtcgccgtggagccctcggacgtggatcgttttgatttagctcccggttcgcgcccacccatctctttgaaattgtctcggagaacgcgaaggtcccgcccaccgagacgatcgcacgtggtgtttagtcttttgtacctttcagactccaacgcgtccgcttgggcgcggtcagggttccgctgcaacgtgggaccttccggcgaggcgacagagggcacaggctgcttgccgcaagccctggggcgtaccaccgatcgttgggtctgggcactacgagttttagacgccggaggcgtaccggcgatgcttctcggggacgggatgtgggcgcttaacccgccgctaactctgccactgccatttttcgcctcgcttgtgatggcaacctcgtcgcggtcacccacaccaccaccttgtgcctcctgttcgtcgtcgtcgccagtagcggggaagtcggagtcctcgatgaagtccgccgcgatctcgacggggacgatcccttgaggagtagttacggcccctatggtagtagatctgccttcctgacgctcggcaagcctctggatacggaggtcgcgagagttgctgggatcggtcggttcgtcgggcatgttctcgtccaaactcctgtccctttcgccaagttgagccgaggccgaagtactgtccttctcctcttcctcctcctcttcctccccatcctcttcctcctcttcctcctcatcctcttcatcctcctactcgtctccggcctcttcgctgtcatcggcgccgcccttatcggagatcggcgtgcccttgtccttctgattgaaggtggtggtcacttcactcaggatgagagcgtcgtcctggccgttgccgcgcccgtcgtgggaggtgtgcgccccgcccttcttctcaatggcgaattggatcacgtgagacatcaggatggctcgctgcctgcgtgtgagctggtctccctggttacccgtcggcttgggcttgccgtacagggcgcggaacttcctccgcagcgagtcaaaatcacgggcgttccattcgcgctccttggagacgttgtagtgggcggctacggcttcccacatatttctaccagtcggtaggattttagcggctatatcgcacagcaacagctcttccttgtcgccgtagttgtggtagcctgtttgacgtccatgctgcacgcaaacggagcggagatagtagattagcatctcggcttgtcagagaaatatacagaatatacatgtatgtgtgcccgcattcgaaccccaggacagatatatgtagtggagggtttcacggaagcaagcccagcccactcaacgggcgacatctatggatcgacgccatcaagctggtagtagaatagagagaacagtaaaaccaatgcgatcgacagagaagtcggtttggtaaaagacgctggcagaaggtctagcaggagtcgtcggcaggaagcagccgacagctagcagcagagacgcagacagagatcactttgagatttacctctaaaccaaaaagagagctttggtttgcccgggaacaccagattccctcgtagccccgaaacctactacagtgtaccggtctaccgtgaacaagatctgatggtattatgttgtttgcaaaatggccaagcggatggagaagcaacaaatttctcgagtggggacgtcgtccaaaactctgtgaccaacatagttttggatgtcggcccctgaagcaacatgagcacagcgaacgtgatgctccgctagttttaaccaatgaaatgacttggaggatgccgtgtacgcatgggtgtggttggttgttttttttggtcatgcagtagatctgtttagtgccgtgcacgaaagtccccacaaatgcactaaagtactttagtgcacttttaacgcacctgcacacaactgatgctggaaattagcgcgtgcactaaagtactttagtgcatttgtggggactttcgtgcactgcactaaacaggtctattgcatgacatgcagcgctgcgttatgcagccgtccggctctaagccactggtttgctgcttttgctttactgttcattctgcgattttgtctccaggcacgcagagaaggagatcagaccgaggatgcgtcttcttcatctggtgttggtggttgtcggggcgctggttgcagtcagtcatggggtggaagcttcgcgtggcgctccaaagttgagggcgctagcgaccagcgatcggttcttggtgaacggcgaggacgtgagtgaggaggaacgaagcagtcgacggaaacgacgtcgccgacggcgaaggcattactggtggattggacacgatgatgacgacgacgatagcagcagcgacgatggctagcgtgtagtaactcgtagtgtttctagtagttcaagagagctaagaaaaagttatcgtcgcaatcgattggaacgagtcaatttagcaagagaaaacgttgcgagttttttttttcggggttctatttcttgttctcaatccagtatctgtagaaaactaaatctcctaaatgatcatacccctaaacagaaatgtactatgactcgtggcagtagtgtattcgttggccgggtgtatttgtttttgcgttgtatttttcaagctgagagctggaagatgtactagtaaaaggcaaaagtcaaaacgatccgacacgcgagtatgatatccgacacagccttgtctagcgcgatcataggtcattatccaatttttaattgaataatccgcaaattaacccccccccagcgcgagacgctgtatttgacacgattagacaaaaagcttaagttgtattatacacgttaaggatttttccacctattttttgtatggaggcatacaaacttgaagtcaatcgagggtaggtttgtgtcccatcctttcccgatcagtctgcagagccgtgcgtattacttaatcttcgtatttcctaaaaataaggtgctagaggtgttcgtcaaatcagtattagggattacaggcgttttcgtacgccactcgtttcgagctcactttagaaaattcgccgcggccgcacagacctcatccggccatcttccccgtgtcgataccagctttcaaggccaaatgggcacccaggaaccccgtggaagtcgccttcgtctcaagcaactgaagcccacgaggcacaacgcgagcgtgtggatgccattgctggatcctaaggaagtctgtaaggtgcgttgttgatgtactgttaacgtttgttcaggtttctagaggtgtacgaactaacttgtatggtttgatagcagcgaagatgaagaagggaccgtatgcgggccgacgaaagcaccacagacgtggatccgatgcaaggttacattcatgtagcttgtattgtacatggtatgcttctaacgttatcgtgtatgtaccgaatgcttagattatgcaggtccagcgtgcctcgcgattgatgccccggtgcttcgtccagagcaaatgaacggctgtgtaaattaaccaagccctggaatcgagtatcgccgtcgaagtcaggccatcgggtacaatctgctacgatgcagatgcgctttcagatattctgacgttgtgtgtgtgtgtgtgtgtgttgaggaatcgtttaggttctgatcatgaaggagcctcaagacagacccgcaaatacatcaaggaaccgcgaatggctcggaaacggagcgacagggttcgtttaacgtgtacatacacgatacggatgtgctttactaactactatcatgtatggtacaggggtgtccagttttctgtttgctggtgggctcatctcgttctagaatgaatgtggggtaagtctcgcctcctacacggaccaccaagcagcatgtcacaagctactcaagtcaagggacgactcccaaggttcacgaagcggcatcctcacggtaacagcgacagaaggaccacgaattcatatgcagtcagataaaaccttgctgataatatacaagtggcatttccggatgaaaatatgatcattttctaaagggtatatttgtcgctactatgagcggtgtgtcaccacgggctgagcatggaagctttcttcatgcacatgcgacgatgaaggctcccatctaccctagtcgtacattgataatcgacaaagctgttttcaatagtacgtggaagtgttcaaactccgtttgtctcgctatcgctaagttctgttatcgtgtctcatacaatatactatagattcaatcgtgtataatacacgatatagtcgtttcatcaaaaacatatatggaagcgatcaacgctaagtccttcgcgcatttgatgccagtagtaatggattacggtcgcgagtgacaacacccctgagcaagtacgataggcgcttaggtacgtagttacaacaatagagcatttggttggtgatgtatgtacgctaaagcttcaagcgatgtagtcatcctttgtaacgaggaagcagcatcgatgaaatgcaacgacgggaggtaggcaccgtgaccctcgcggaataacttaggcgaaggctcgcgaacgaatcagtgcaggcggtgactggcagctaccgcggtacgtattcgacggatgtggaagcgtcgcgtagcaacgcaagcgcgtacgatgaaacgcaatataatctgtgctgcagctcttccgactcttttattgacttgatttcaatatacgttcgccatgctagccaccatctgacttgagtctcaaaatttcgacaaaaaagttatctgacgactgcgctgtttttgcacggtatggacacgttaggcccagtaagctgtatcgagtaggtatgttaacaaacttgatacacgttagactagagatgccaagtcagagctaggggcatggactggctttggtagatacacgattggattagtatggactaaactataggtgcccagcacgggataaaacaataacgtgtttagggtttcggtaaataggcgcatccagaacctctcgcgctgggggggggggttaataagctacggcatgatcaagcactgatgcgcctgaacagtacatatatacatgtatcggaggagcaactgtacgtatcatgaaaaatacatttcttaccgctgtaagaccgctatcggcgtcagtgacccgacactgctaacctgctccagggtgtacgttacaaagtaccatattcagttattttgattcgcaggtcactcattcctcgaatataaacgctctcgctcacatacagaaacgtccttaccaatattaacatacatgtacttcttagtttgggcactcaaaagcgcgattcgtacacattgattgattcgtacgattaaagttattatttacttcgtatgtacgaatatttgtgttgtgacgacggaatactgtacatcgacagcgttttgcacggcacagactcctacactattgtacatgtattaggcacttcatgtcgtgttttgctgttcattcggcaaattaatctccagccgcgaagagctccgagcctccaacaaattatgcgttttcacgtagtgttggcgattgttggcacactgtttgcagttagcaatgatctaccagtttcgaccgatgtaactgcgttgagggtgggagcatccaccaagcagatcttggcaattaacgacactcagaagactgaccacgccgctgagctggcggatccaaacgaagaggaacggagcactcgacgacgtcgacaagacccttcttttggtttctgtacgacgacgacgacgatgatgacaattaacccactcggaaggaaggttccgaagtcccaccgtaacgaatgtttctcgaagacaataccatttggatcgctgtttctcaaccggtcaattcttctgctgtaccttcttagtctcctttttcttcttcgttctcgtcctcgttttttggatcctcttcttcctcctcctcgcctaccctcctttttgctcttcctctttcttttactcaccaaaaaggcctttcttttcgtccaaactatcggcatcttcctggtgaccgaccgaccgaccgacaataagcggccagtcaagacatcgccaccgatcgattctgtggcgtcaccagggattgatagtagcgcgattttcttcctaaattactatagtagaattgacaaggccaattcaattctactattccaatattaacccattctagcaatccagaatactaaattaatattactatagtaatttaaattactactgtcgaccaccaggtgtcctccatgtcgaccaccaaggtatcctccatgtcggccaccagggtcctcgtcgatggttttgtctgcgagctgcatgcgacacatagttttcttgttgtgctccaacagcacctacatctcagcacgtagattgtctgtacgaaggctactcatcacaaactcagaatacacgctcttcaaaagagtaattgcgtcatcaagatggcggacagaggactccaactttttcgatgcctctatcttccccagtggacaatcgccatgaggcggcatcatgcgcgccctcacgttggatgcgtgctgccagcggtacaaggcaccttcccacgcgttggggcttgcgtgtgggtggcaagcgagctcttgagcacacagcaggcaaacgtgactgaaagtcgctgcttcgccactctccaagatcacgttgggcgcattaagttgatgggacagttcccacacgtcatggcggtcgcggtccagacggtggtgacgaatctcgagatggactccaaatgcgtccgcagtggccgaggacgccggtcttggtgctgccgtcggtggtagcgtggacgaggtgacagctggtggcgaggctggctcggtttccggtgtccattatggcggtaagtttgtcggaggcggcgaatccagcgccaaacccacaattggcgtcgccgacaagcccgcgatgagtacttggagctaggacacagggctgtggaaatatagattgtttattgattgacggctcagatctggaacaatcaattattgcaatctcaacaatctcacaaacaaaaagattgcaatctaagttctcgcttgtatttcctctgctacgtccatatttttactggtttggcggcgctatcgctctaagacctttgcttgtgcgattacatttgtgttgagcttcaaaaaccttggccaaatgcaatgttgggtcttatattcatcatggtgagcgtgcaccccatccaggcatccaatgacccctcatatccgcatttcgaagcaggagaagacacataatggcttttaggagctaggatcggttccataggtttgacgttgcgtatttctctaccggatcgcgggcaaaggctcaaaatcagtataggaacaatatgggaacgggattaccgattgcgatcacggagcaatcaattattgtgattgacaatctcggcaatattacaatcgcaatcactttttccacagccctggctaggacacttcacggacgatcttggtcgagcttggttgagcgagcgagtcggaaagaggttgtagacttgtcgagctgctggaagattacagaatgagcccaaaccgaacgctgcaatttgtagcctccaatcgctcactgcagagagctagtagaccggtcccgtgcgacgaaccgcggccggcgaacgcgtgagcctcccagcagcgaattcgcttcctccattgaaccggccaaacgccctgcgttagccaatatacctctagtatccaaatagtactatatttagccaaaacacaactaatatctactatagtagaatgtaatcagccaaggaaaattctactattactatagtcgaataatattattttaccggtaatattaaagaaattctactactggtaatatctactatcaatccctgggcgtcacccttcaaagctgtctttgtggagatttcgcgcgaaacagtgagtctgttgatcatcgagagcgaagcggcaaacacggcaaccaacagtacgcggtgtggattcattgggggacgttgggtcttgacaagttggggggctgtagaactggatggcgaattgcagaatgcagtggcggattgaattcctcatgttttataacagcgaacgatatccattactaagtagttcttaataaagctctcttcctattcggcagacagaaccctggtatttagtccaaaactacaccattgatgatagacgcccgtgtcggaatgagcgttggcctcgtggttgcattcgctggaggggtcggagttggtgtagcttcctcttcttctttttctttttcctgctcttctcgcgttttcttcttccttttcttgccgaaaaacgagaatctttcttcgtcatcttcatcaggggtgacctccagagcacgatcttcatccgtcgccaaaaagcggtcgtggttgtcgttcatctccacgccagcccccttcaacgaggtttttatgccagatccggcgacggccgacagaaatgtggccacgaaggcagtcaccaaaattactccgtacacacgcattgggttgctcttgtgactgcgccgtgagctacttggtcgagactgtggtgttgagcgagcaaattgccaagtgaaacgctaggaagcaaagcggattaggctgccccgggaagttatcgagaccagaatcatcgagccggagactccggctgagccgtcacttccaatgaaaatcatcaaagcacacatctgtaggatacactgcgtgcttcggatccaaatggaccatttgatgggcgttgaacgcttcaccaaggatgagaggcttcaacttgaagccacttatcctcggtggggattcctcgacgagaatttttatgactcacaaatactaccgacttggcgtgtatattgttacatgtagctttcgttggcggcccgcattgcacaccgtcctcggaaacacatacttacgttcctgtccgctacctatttgctccagccagcaagtactcagctcggtcgccgtaagagtcttacttacagcgactttccaaccagagccgaacgcatggcgctgatcagcacgggcaccacctcgggctcggccagcgtcgacatgtctcccagagagtcctcctcgccgtgggagatcttgcgcagcacgcgacgcacaatcttgccactgcgcgtcttgggcagctcagggaccatgacgatgatgtcaggcgccgcgaacgcgccgatcttcgaacggacctccagtacaagctgcttctcgacttccggggtagactcgacgccgtccaccagcgtgatgtagcagcagataccctcacccttgatgcggtgcgggataccgatgacggccgcctcggccaccgcggtgtggcccacaagagtgctctccagctcggccgtgccaatccggtggccagacgtgcacagcacgtcgtcgatacggcccgtgatgaagtagtagccatctttgtcgcgacggcagccgtcaccggtgaagtacaggcccttgtgcgaagcggtgtatacctccaggtagcggttgtgatcgccgtacacggtgcgggccatgccgggccacggcgagcggatgcacagctggccctcgataccattgccctcgatctcattaccgttctcgtccgtcaccacgaaatcgatgccgaagaacggcttcgagcacgaaccaggcttcataggcgtcgcgccgggcaggccaacaccaatgtgtccacccgtttcagtctgccagtacgtgtccacgatgtagcactcgcggttgcccaccacctcgtagtaccatttccacgcctccgggttaatcggctcgcccacgctgcccagcaccttcaggctcgacaggtcgtactcgcggatcttgtcgtcaccacgggccataagcgcgcggatggccgtcggggccgtgtagaacttggtcaccttgtggcgctgcaccaggtcccagtagcggccgtggtccgggtacattggcgtgctctcgaacatgacggtggccacaccgttagccagcgggccgtagacgatgtagctgtggcccgtgatccaaccacagtcagcgacacaagcgaagacgtcgtcgtcgtggatgtcgaacgcgtacttggccgtcatcattgcgtacagcagataacccgctgtagtgtgcgcgatacccttgggcgtgcccgtggatcccgacgtgtacaggatgaacatgaggtcctcggcgttcatgaactcagcggggcagtacgggcggtggagcagcagctcggcgtccatgtcaacgtcgatggccgggttcatgttcacctccgggttgtgagtacgcttgaacacgaagaccttctgcacgaagtcgaggccgttcagggccacatcgaccgtcttcttgaggggcaacgtgcggccaccgcgacggccctcatcggccgtgaacacccacttggtcttggcgtccacgacacggtcacgaagagcgtccgcggacagacccgcgaagaccatgctgtgggccgcaccgatacgcgtacaggccagcatgacgaagacggtctccgggatcatgggcatgtagagagcgacggtgtcacccttcttgacaccggcgtgcttcatggcgttagcgatgcggcacgtctcctccaacagctccgtgtacgagatgttgcggccctcaccgatctcgtcggcctcccagatgatggccgtcttgttcgggtgcttcttgacatgacggtcgatgcagttgacgctcacgttgagctggccgttgaggaaccaacccacgtcgcccttggccaccgtgcccacgacggtctggtcgaagtcgcggaaccagtcgaggttctcgcgggccagctcgccccagaagttctccgaatcctcgagcgagcgcttgtgcatggcctcatactgctcgaggctgccgacgtgcgccgtcttggccagctccgggttgaccgggtacacgccgttgaaactgatgcctgcgatgtcgcccatggtgctcttccgtttgtgagggccaaagagggcggtgaactttatggccggcggcggcgctgcccgagccgagtcgcagccagccacgccacgtctttattcggacctgcagatacaaagcccgcctcgcaggcctcctgtctatggcgagctgcgtcatctcgtgcggcagttttgctcgcggctccagtcggccgttcctagccccagatcgcagcgccaacgtggcgcgtcacctcggcctgctttcatgacgtggggcgccatcgcagccccacacatcgcaccgggaggaagcagccgttgcgtttcaggctctgtggtgcaagcactgaacgcccgccgaacctggaacctggactttagcgcaggccctcgaccaccaggccttgttaattaaacgccgcggcgcgccaggagcagcccctcgaaactcgagccatgttgggccttgcaaacgagcgctcgccgcggccttgtccggccgaggaagtgtctcgcgggcgcacgacaggcccatgcggaagagcgcggacgctcgggctcgaaagcgctagctcggccacgtcaaacatgttgatgagatgagcctgggagccgcgtgaaccggagccgagatcatccaaacaattcggcccggaagatgccacggatcttcgagtccggcgccttggcatgcatcgcccgccatgcaggcgcgagcgtttcctcggccagcgtggcgctcgatgccgggccgtcacaatgagcaacggagcggttagcagggcccaccaatgctgcttggacgcgtcgattccggctcacttctgaacttgtgcgacacgcatgacgcagagactgagcgcaaagtgacgcgcgcttcaacttcagcttccagagtgcactttcagggcccgcgcgaacttccgccctggacccgcagaattccagtgcgaacgccaagcgcaagacaacggggcacacaccaccaccacaccaacgcgaagcgaaatggagaaacgatcaattcattatcgaaaagtacgtgcgccgactcagcaaggagcggggcgattgcgacgactaccaatacacagacgagcggggattaaaaattgaggtggggtgcgcggcgtacgcggacgacttagaacgacttgccgacgagtgccgccttggtgttggtgatcaggatcggcaccaccgacgggtccgccagggtcgacacgtcgcccagcgagtcctcctcgccgtgcgagatcttgcgcagcacgcggcgcatgatcttgccgctgcgggtcttcggcaggccaggcaccagcacgatcaaatccggagacgcgaacgcgccgatgtgtgcgcgcacttgctgcaccagctccttctcgacctccttcgaggacttcacgccttggacgagcgtcacgaagcagcagataccctcgcccttgatgcggtgcgggatgccgatcacagcggcctcagcaacgacactgtgcgcgaccagcgtgttctccacttcagccgtgccgatacggtggccagacgtgcaaagaacatcgtcgatacggcccgtgatgaagtagtaaccatccttgtcacggcgacagccatcgcccgtgaagtacagacccttgtgcgtcgccatgtaggtgagcaggtaacggttgtgattgccgtacacagtgcgggccatgccgggccacggcgagcggatgcatagctgaccctcaatatcgttgcccttgatctcgttaccgttctcatcagtgacgacgaagtcgataccgaagaacggcttcgtgcacgaaccaggcttcatgggcgtcgcgccgggcaggccaacaccaatgtgtccacccgtttcagtctgccagtacgtgtctgcgatgtagcactgacggttgccgacaacttcgtagtaccatttccatgcctccgggtttatcggctcgcccacgctaccaaggatcttcaggcttgacaagtcgtagtccttgatcttgtcgttgccgcgggccatcaacgcgcgaatagcagttggggccgtgtagaacttggtcaccttgtggcgctggatcaggtcccagtagcggccgtggtccgggtacatcggcgtactctcgaacatgagcgtggttacaccattggcaagcggcccgtagatgatgtagctgtgacccgtgatccaaccggcatccgcgacgcaggcgtacacatcgtcgtgctgcaagtcgaacgtgtacttgcacgtgatcatagcgtagagcaggtagccggccgtcgtgtgggcaatgcccttgggggcacccgtggatcctgacgtgtacaggatgaacatgagatcttctgcgttcatgaactcggcggcgcagtacgggcggtggcgcttcatctcgtcgtccatgtcaatgtcgatcatggggttcatcttgacctccgggttgcgcgtgcgcttgaagacaaacacgttgcgcacgaagtccagtccgtccacagcgacgtccacgatctgcttgagcggcagcgtgcggccgccgcgcttgccctcgtcggcagtgaagacccagtgggtgttggcgtcaatgagacggtcacgaagagcgtcggccgagaagcccgcgaacaccacgctgtgcacggcaccaatacgcgtacaggccagcatcacgaaggcgatctccgggatcatgggcatgtagatggccaccgtgtcgcccttcttgacaccggcgtgcttcatggcgttagcgatgcggcacgtctcctccaacagctccgtgtaggtgatctcgcggccctggccgatctcatcggcctcccagatgatggccaccttgtcggcgtgcttcttgacgtggcggtcgatgcagttgacgctcacattgatctggccgttcaggaaccaggccacgtcgcccttgttgacggtgcccacgacgctctggtcgaagtcgcggaaccagtcgaggttctcgcgggccagctcgccccagaagttctccgggtcctcgagcgagcgcttgtacatggcctcgtactgctcgaagttcttgacgtgggccgtcttggccagctcctggagcggagggtactctccgttgacgctcacgccggtgctgtcgcccatggctgctgtgatgtggagagaaggttcgagcgggagggcgcggtgcgctcggcaaagcaaattgcgtagtggggtcggggctgtgccgagcggaggcaccggacgggtggccccccttcagaatctagggtgacaacttgcactcgttgcagtttgaggtactacccgccgatagtgatatagcttcggagcagagtcttcatgagcggataacattgtattagcgaagcaaacgtgctacggagctttatctgttatgcgtgtctctgggagtggatatgtttggtaaaaatgcaaaactaatagtattcattaaagcatgttattcgtgcggtccacactgacggctgtcgataagaagcgggggagcgccaagttgaacttgttcagtgaacccatctcatgggcggcaataaggacattagcaatagtggttaatgtgctatcctttgtcaaggcaccggtacttaagaacatttgaccttcgacatcataaaaaccgccgaagcttgcgtttccaaaccgctgttaaaggcaaacagcttggtctcagtatggtcttcggctaagtgcgagtcggcctcgctcagtattcgctagacacgcaacatagctgcattgcgtcgctctgaaagaccgccgaaacagcaacttgccgtcggcttcaacttgaccctggccggcagcccagcccccaagactttagctcgcttccatacactcttgggcgtgcaaacttcacggctgaagcagagcacctgctggccctgtgcagacagattaactgctcgtcgcttgcgtcaggtccgccgctgctggcggtcgtcatccgctgcggctgcggctcggcattgaggacggacacgttgaagttgttgcccgtggcaagcgccaagccttgccatcagcagggccggccacctgactgccagcctgctgggcggggccctatgatgattattttgtgcacgttgaagactagcgccaagtgtattcatgtgaaatgcatgctaaaccagagcggcctcacgtcgaagtcgagcgctagatgcagcgcagtggccgactacttcctccgccgcaaggattttctcgcggatgagtgagcgaggcgttcggcacgggccaacagtgctcgacgcgtttcacgtgatgactcggccgtcgacctggaccagcggacgttgaagttggcccggtttaacacttgccttgtgcatgctgccgcttgccccagcgacaaccagcctctgcaatgcagctcgccgcgagccaaacacagcgagcaaaccttgctcggtcttctcctcgaggcttggactgtggccagactgtgctgccatgtgcccgtccccatggctcttctcgtggatggccgctcacgttgaactaaaccgccgagagcagaaggaaagggtcaacggccagctagccgcacctgggtgctctgctcgctcatttcggaatcttctccggccagcgcaagtcactcctccagctacccagcggccagaccagtcacaagcatgggagacagcgcgggcgtgagcttcaacggggtgtacccggtgccccagggcctggccaagacggcccacgtgcagagcatggagcagtacgacgccatgtacaagcgctcgctcgaggaccccgagggcttctggggcgacatgggccgccagcacttggactggttccgccagttcgaccaggccgtcgtgggcaccgtcaacaagggcgacacggcctggttcctcaacggcgagaccaacgtgagcgtcaactgcatcgaccgccacgtcaagaagcacccgaacaagacggccatcatctgggaggccgacgagatcggccagggccgcgagatctcctacacggagctgctcgaggagacgtgccgcatcgcgaacgccatgaagcacgcgggcgtgcggcgcggcgacacggtggccatctacatgcccatgatcccggaggtggcctttgtcatgctggcctgcacgcgcatcggcgccgtgcacagtgtcgtgttcgcgggcttctcggccgactcgctgcgcgaccgcgtggtggacgcccgctcgcagtgggtcttcaccgccgacgagggcaagcgcggcggccgcacgatgccgctcaagcagatcgtggacgtggccgtgaacggcctcgacttcgtgaagaaggtcttcgtgttcaagcgcacacgcaacccggccgtcaagatgaacccggccattgacgtggacatggatgaggagctgctgcgccaccgtccgtactgccccgccgagttcatgaactcggaggacctcatgttcatcctgtacacgtccgggtccacgggcacgcccaagggtatcgcgcacaccacggcgggctatttgctctacgccatgctgacggccaggtacacgttcgacctgcacgacgacgacatcttcgcctgcgtggcggacgcgggctggatcacgggtcacagctacatcatctacgggccgctggccaacggtgtgaccaccgtcatgttcgagagcacgccaatgtacccggaccacggccgctactgggacctggtgcagcgccacaaggtgaccaagttctacacggccccgacggccatccgcgctcttatggcccgtggtgatgacaagatcaaggactacgacttgtcaagcctgaagatccttggtagcgtgggagagccgatcaacccggaggcgtggaaatggtactacgaagttgtcggcaaccggcaatgctacatcgcggacacgtactggcaaacggagaccggtggccacatcggcgtgggtctgcctggcgcgacgcccatgaaacccggttcatgctcgaagccgttcttcggtatcgatttcgtggtgacggacgagcacggcaacgagatcaaaggcaacgacattgacggccaactgtgcatccgctcgccgtggcccggcatggcccgcaccgtgtacggcgaccacaacagatacttgaaggtgtacatgtcgtcgcacaagggtctgtacttcacgggcgatggctgtcgtcgcgacaaggatggttactacttcatcacgggccgtatcgacgatgttctttgcacgtctggccaccgtatcggcacggctgaagtggagaacacgctggtcgcgcacagtgtcgttgctgaggccgctgtgatcggcatcccgcaccgcatcaagggcgagggtatctgctgcttcgtgacgctggtggacggcgtgaagccgagcgtggaggtgcagaaggagctggtgcagcaggtgcgcgcgcacattggggcgttcgcgacgcccgacctgattgtgcttgcgcctggactaccgaagacgcgcagcggtaagatcatgcgtcgcgtgctgcgcaagatctcgcacggcgaggaggactcgttgggcgacgtgtccacgctggcggatccagaggtggtgccgacgttgatcaagaacacgaaggcggccttggtgggcaagtcgttctaagtggtctgagacgaaacaccggatcatcgccgcctgcatacatgtacgtgcatgtcggattaagtgtagtggcgtgtagcatattttaattcgccgacctggtgtcggctatctaatgacttgatagtgtgaaggctgtttgcttaagttctcgtgagtgcgtggtacatgcttgatcaagaaccgctatcttcctgtagttgtgagagaagtggcaagtacatgtacttattgaactaaggttaagttcttgctagcggaaagcacacataagcagatcatctcgtcactaaacatcacttttccgaagttttctgatgcgcattttccatctcttcacactaaacaacgaagaagagctggtgatctactatgtggtcgtgggagccttcctggaggagttcgttgtgatcctaaagtccagtgaggacgtcgcagctctcacgctagctatcaaaaaggccagtatcggtctcgatgacgtcgacctggacgagttggaactatatctcgcccaacagcccaccggagggtggctcccatgcgactcggacgaactgaaggctctgaaggagggaaacgaaggtatgatcgacaaattttgtgtggcgccgcttaatcctgtggacaaactctcagcacttcgatgtggccacgttgggtcggaggaatattcacgttctcgtcggcatcaactacaagatgacagtggaagagcgactccgacgcagccacgaagtgcgagacgccgaggtggagctgtggtgtttagtcgttggagacggcacatcggtcttccccgtgatcatcaagaagcttgctctcattcaggacctgcagtggaggctgaaaatgcgtatatatcggtacgcattggatgttcgagaggaaacgatcaacatctacgaggctatcgacgagcacggaaattcactcaagagctaatcacctgaagtagctacgttgagggccggaaatgaggaagttgcggacaggttgcttcggaaaaagctggatcctctcaaaactatcgcggaggtttttcacgacttcgaggagcacacggtccactttctggcgctcccaccgtcgaagtttgatgtgagtgagtacgaaagaagctggtcgtcctcagattcggacgatgaggcgccaagtgaatacgtaagaagctggacacccacagagccgtacgaggaagcggcagaattgttgaagaatgcccaggaggtgagcgaactcgtggcaattgtgaacgacttggcaagcctcagcgctgacgtcccatacaccatccccttcattatgctggcaagttcttccggaacgggcaagactcagatggcctttaatttgatggctcgggatgatcttgacgttttttgtttcgcgtgtgtaaatgacggggaagttgtgcgcttggcgttttgttaccgctcgtcagcattcatccagtgtgtggataaagacattcgtgaagtcggtgaagctggagtgtttgagatatcacagcagtcggagttgtatacctacgcgttcattcggacgctgctgagtgatctccctggctttactggtacacgaaccagagcagaagttttggatgcgataaatgcccgtcgagcgagaggcaggcactgcgtcttcttcctcgacgactacccacacatcgacaacagcatgagcgaagaagaaaagaacttgtggactcgaaagatgagattcatgcgaaatgtcttccgctcgttcgggttggtggttatcgtgagcgcgtctaacaaagcggccaaaagtattctgacgacagccgtcaaggcccaaacacacgacgaactgtggtgtgtcgtgtacccgttgctccctcgctttgaagacccgtccctgaagagcctgccacgcgagttacagacgattattacatgtagcagaccgatgtttgggaacccagcgatggaatacgtgagctcacatccttacgacgagggcatgggtgttgagaagtacatgaacacaatggttcagtccctagctcgagcttttgtctatggaggacgatacactcctgaaaacgtcaacgaaagtcatgcgcgactgtttctcgcgtccagctacagaaagagcaacagtgaatatggcgatacgaatggccccgctggagacttttcccgtctgtatgaaacgaagatgttcgagctctggcttcgtggttgcgagtaccctgtaaaaggtgaaaatggcgctgaaccgtggcggtggagcagcatttttccaagtccgggggaggatgttctgctgcatctttgcttgggtgctgtccacgttttcaagaaccaacgggttagtccaattccactccgcgaggcttttgcttttgagtcggtcggcaataccacactggcagaactagccaccggcgcgcttgtggttgcaagtcgagggggcggattcggtgggctgccatttccacgatttctgtctgctttgctgtacgagctgggggtctacgggagcgtgataccgaagtcaaacttccagggaaagtgacggagctcgtggctttggcggagaaaataccgttcccggcgcccctcacgctggagtggcccgcgtttcttgcgacgactttgaacttagggtctctcaaagaatctggcaggtctgatgccaattcaatcagtctgtaatttggtgtgatctcggtccaaggcaacctcagccagggaacgcttacgaaggacgatctggtggcatgttttgatcgagttcccgccgaatgcaccgtcgtcttgttcttcctacaagacatgaaggatctgctttcttactttaagaagcgaaagcaaaagcgcgatcggaagaacaagaagcggaagttcgacgatgttactcgtgaatgtccatggctactccgtgctgtcttctacggcgtgaatcgcgtcgaggatggcatgttgggagtggagactgagagcgtctcggttcgtcacatgaggaacaactgcaacaatgctgaatgcactgggaagcgcgcgtgtgaacatatcgataagctggtcattctggtagaactgccggaaagcagagcgtaacaggtcttcgcgaattttaaagtacccgcgtgtcatgcaagcaatcttggcaggccacggcggaaacaaaatatctacagtactacgtagtagtactgcaatgcatccatgccgcgccacagtatcccggcgaacaagacactagcgttaatcacctacaagtcctagttgatttctagctacacaatgggcagcttggttgctaggtcaataccgtcgctcagggccaatgcaagtgggacttaagaaattaatgcgttgaaaaagaagactacgcattaggtttaacggtgcttgcggaagtcgcgtcaggcgttgaatctcctgtaatattggagaaacaagcgtggaggctttcaaagtgcggacggcaaacgatggtacagttgggcatggcacggtcgagtttcgcaacgtttgccatctcctctcgtactgtttgaacttcgagcgatcgacaaaagtttaccgcttcaactttcgaccatcgaaactatgtaccactgagcaatggtacactccatcacgctggacttttgggtctcagtattcactccacctccaccagcagcgagaccgagcgcagccatgctggcgtccgcccccaagcgctgccgcgcgcccagcagcgacagcgacgactacctcccggcggcgcacaactaccagctggcgcccatgaaggcgcttctgcgctcggcgcggcgcgacttctacctgcagagtctggcggactcgatcaagtccgagaagcaggaggaacaagaggatttgggggtcaagcctgcgcctaattcggacctggagctgggcaataagtgccgcaaactggcggagttgatcgccaattccaggcatttagtggccttcacgggcgccggcatcagcacgtccgtgggcattccggactaccgcggggagcacggcattcgcacgaaaaactttgataaatccaagctcagcaaggccaagaaacggcgtaaaacggacgaagacaatgaagaggacggcagcgaaggggacgagaacgacgctaaaaatgaggcggcgcggattaaaatcccggactttaactcgctcgtgccctccacgacccacatggcgctctacgagctgcaccgcctcgggtatttgaagcacgtagtgtcccaaaacgtggacaacttgcaccttaaaagcggcgtgccggccagtgcattgaccgaggtgcacggtaatgccacgcaggccaagtgcgagacgtgcgagaagatttacaccaaggacttcccctggactggactgtgtgatgaccccgagtgcgtgagcaccaaacgacccgtggagcagaggctgagggcgcgtacacggcatgggaacggccgactgaaaaggaacgtggtgggctttgacgagccgctgggcgatatcgacctggccatcgacgagtgtgaagcggcggacgtggcgctggtgctcggcacgtcgctgcgcgtggagccgttctcggagatggcgggggattacgctggctcgctgtgcattgtcaacttgcagcccacgacgaccaagctggaccgccgcgcggaggaaacgggcgtgcggttgttcgagaagacggacgtggtgatggagaagaccatgcagtttttgatgaaggaccccagctatcgagttcctaagtggacaggagagcacccgacttcggtgtttgtccccgagcacgagagctcgaatctggtcaacgtgctcgctggccggattctctcatgacagccctgcaggatggtagtggtttgaggcgttctctacctgcagtatgaaggtgatggaaacctcgaggctgttaatttatatcgcaagttgtgcttttcccacgaactaccaagcgcaggcattttggggggcgtaagtgacaaatgaatatatcgacattctatgcgttaacacattgtgcataccatctaggactcgttcatgagcgccgtgatttccttgtagtcggtgatgagtgcgtccagctcttccgagtacttggttgtgacgatgatgtcctccattggggcggtcatgtccgacgccttcttgaggcaaatcttgtactgcgggtacgcgccgctgcagaacgcaatgtcggtgtactcgcagaacgcgagcatggtgccgtcgcggctgaggaagtgcatgccgtagccattcacacctatcacaaagtagttcggcagctcgatgcccagacaatagttcaggccgttgccctttgcgccgcggttcaccaacttggaagggaagaagcaggagccgtacaaccggtggcgcgtcacctcttcgatgtagatgcgctgcagttcactcacagggaactgcgcgtcttgctcgtccagtaggttgtccgtgatcgtatcgagcaccagctcagcccattcttcttcatcatgcgccggacgccattcctgcggcaagtagtccaagacacccatctcgatgacttcctccacagacagcggtgggacctcttcgcagtcaacagcgatggctagcgcagtcagtcggagcagagcctcctcttccaatacagggaggttacccttcacgatctcgtcctgcacctgaatgtacacaaggcgatcgtacatttcgtccgtgtactgcagcatgtagactggattgagccgaatcttgaggacgaatcgcacgtcgcgtcctcggatcagttccttctcaaagatatcacccaggaaggtatcagcgttgaggaacgatggcgctgagataaacttgtggaagtaacttgatggagatgaagttgaagtcgtcgaggacgtcgacgtgctgacagtgagaactggagggggcggaatctccttcacaccgccgttttcgttgttatcgggcgttgagtcgttgccttcattgcttgccgatacaaatgagctagctgcaccagtcgagctctttccaacaacgacgcgctcagttatcgtcgtcaagcccaagaagttgacaacgtggtcttccaagccgaggaaatgagaacagatctcgacaagctgggacacagtcaactctggcgtgatcgggaaggcatctgctaaaggagtgccatccagcaactcaatcgtcgcaaggaatggtggccgcgcttcgtagccacggatttcatcaatactgggaatgaagcccgttgctccgttctcgagcaaattctctagtttcttgagcgaataagccgcaaagtttcgcacgagccgccaaaagctgttggaatcagcaacttgcgccttcaggaacatgatcacatacttctggagggctaacgacggcgggaatgaggtcgcacacatcgcaaacagagaccaacctcgaatactgctatccctcttcgggttcttggtgagctgcttcatgagctgcagatagatttcgtccacaagagacggcttcataagaccgatctgcaggatgtactgcgccagcatttcgcggtagaaaacgattcggtcacgcatgtaccccagaatgcagcggttgatggagagtgccatttgcccggcggatgcagatgaagcgagcgatgacacttcgtcaggactgtcatccagcacagacaggctctgagagatggcacgactttcccagcacaacttcttggcgagtgcgcgctctgactgcgcgttaaacccacggaggttttcgaaatgattgaacgccagcgcatctttttcagctccttgctttgatttcttgtcacttgcgttctcagatccgtcgtcctctcccattccaggccactcagttgtatcacaccgtggacgctcgccttcatgcagactgggttgactactgctgtcgctatcattacgcgtaagcgtgccaggaccacgcaatcggtcaccagcaacaacagacttccttctcgccgtcgccattctatcttcagctttcatcagaagtcgttcgtggacgccagcttctcttgccgattgaatgctaagttccagcgctcctactgatgatgcatcagtcggtagagcaagagtggcttccaggcgggcagcagccgaaattcgagattccaagctccggcgtaagttgcctgctgtaaggagaaccttttcacgctccgcttcatcgtacacgatttcgctttcaccatttgatggagaagaaaactcttcgatctcagtagataacagctgcaccgcatcctcgcgaatctcggcgttctcgtcgactcgacgagtcaagaaatgaatggcggcatgtagtccatccatgatcgcagtaggatccgaggcatcttcaccgttagcaccgcttcgaagttttgaaaaaagctcgaacaggtcgccaaacaaaggcgagcagaacccgatgctgatagactgtcctagctcttgctctacgaccttcgggtcatcagtctcaagggcctgccttaaagcgttttcgacgctagccacctgctgcagtcgcgccgacttcgcttcaaacaccgcctccaactcgggggtgacggacgaacgcaactggtccagatcactgatacgctgagcttcccagatctgcaagaatagcttaatcggtgatggctccagtaccttctctttcttcacaggggacttgattggctttggtgatgctggcttcaccacagcaaccagagtcggaggaggactgtccccacactcggcagcagcgatcagcttctcgcgttctctttcagcattcttcaagttaaagtcccatttcgccaggccaacgccaacagcagcctcaatcgcttcagtcagcaactcgatatcttgagacaactttgccaccgctaagaatttaaccatttgcttgcgctcggaatgtgtgctcgcaggaacggtttgtgcttcaagtgcacgttcagcctcaactgttcgagaatcacctccgggaacaccgagaactttaagccgcgccagcactctctccacggcaacaaagttttcgtcgtccagagctttctggagagctgcctctaagttagtcgtatcaacagagacagacgcactgagagcaacaacttcttgggcagcttcctcttcctccaagtcttcgtcgtcgtcctcatcgtcgtcctcctcatcgtcattgtcaaatgaagtaagatcggaaggaatcgttccaagagtgtccacaagtgttggcaacttcgcttcgacacccaagctgatggctttggtagcaggccccaacaactttttcacaatggccgcgtcatcatcatcttcgccgatggtagatagtgcgtgtgctacagattccacagcgcttttctcctctagcgcacggatgatcatcattgtagctagctttctttccaaagactcaacagaaggttcttccagtgttgctaaagatcccatgagcgcttctgggtcgtttgcaatcatcgaagcacggagcttcttgttgactgcagcatttttctccgttttctgcttttggagagccacaatacttttgcttttcctccgcaaatggtcgacagctagccatggagagctcttttcagcgactcttacagcatattcaatcaaggcaggatgaccgatcctggtagcatctgcaataattgaattgacgtattcttcttcgtccaaacgcgcaataagctgtcggccttcgttcaacacgcgaatatcctccgaagcgcgctttcctaagatttgtgtacagtttgcaaggtgctggataatatcgttctggtcgcgttgcgccatcgcctcacgcaagccccgaataacatacagcaatcgcgccgatttcttccggaagccaccacgaagcatattacgctggatcatggtcgcgcaggcattaaggtacaggaaacgcgccttctccagctttttccactgatgactcgtcaaatacactttcgtctttccaacaacaaacttttcttcttccaaaacgccaatagcagacagcgaacgcaacagcgactcgagcgtaccacggtgaccacagacatttttgtagcgtcggaaaaagtgaccgtacgtcaagtgtacagtgaagatagatcgactggcttgcataagctcaaccaagtggttatcacggatttgcttcatcacgtaggccgagtcgaatactccttcttcaagctcttcgtttggcttgatacatacgaggaagttcttccccgtgtggttcaatgcgtggagcaaggcgtcagcttggttatacacgtctgttgctgcactgtcaccggaactctttgcctccttcgcggagctcatggagtttcggaactttgaggaggtacttcggcgagcagcctgctttgcagccttttcactagatgcggctgccatttgggccgcccctacggcatgcaaaacagcatttttggaggactgcatgatagcagcgcatgttgaagagatgctaagcgagttcttggatgagagccccttgccattgtacgtcaccttgccacagtggtgctgaacgataaagagtagccgccaatctttcgacggtgccaggtattcatttgtcgtatccgcgcccatgttgggtcgcgacagcccacccacagcctcgttacccgaaaacagtttgtttacgaagtcctcgtcattaggagatcgaacctttccgttctctgtcaaaagatcaaaaatgccgaaaggcttgtcctcgaacaactgcaggcacttctcctgctcgctagtaatgtccacattggaacgcactgtcagacggttctccacttgctgcgactcatcctcgagggccgaaaagttgatagctagtgtgttttgcacgtaaaagtgatgcaccttttcactccaatagttgaagcagagctggtcgaagctgttctgcgacgggtccagattctcaaaaccaaccatgtccagcacgtgaacgccctgcgaattgataacgatgtttgacttctcgtaacgatcgaaaattccgcccagaatgccattcagcgtctccacgaggaagttgaagagagactcgtacagacttcggatgaaggtgtccctagccttccgtgcctgatgtacagtcaccaccttcaacgacgacacagtcttgctaccatccttcgagaaaaactgacgggtgcggaagtaattatcaagcacgacaggctcgacctccagcagcttcgatgcgagcaggatctgagcggggtccttcaacgcgcaagattgagcgtcactcacagtggtcgagttcgctccattaacagacttgccaccttcgggatcaggaatgaagtccacatttcctaagtgtaacaatgcagccacaatgcgcacaatttccactcgctggttctttcggatccgcaacgccgaaaaacttgacatcaggtctcggtagtcgcgagcatcaagggcaagattcgtgagatcagggtcagcttgttttaaaatagcaaattcatccacgctcttgttcatttccagcgaatcgcgaagcgtagggtcatgctgcacgcctgcaagcacctggtaaaatacttgaaagttccgttcatggcttctgcagtcgatgacgcgcgatttctcgaaataatgtgtcgtaaatccacccccaataacgtgaccatgcttactgaactccactgaaatcatctttgcgaaccgtgatgaattcgggttctggggagttgctgcatttccgaacgcctccaaaatcgtaaatgcgtgcagaatctgttggccgatggggtgcagtacacccgattcaccctccgaatcatttcgaggagcggccccatctccaatctcgcacaaatactggacaatcaacttggccgcttcggatttacccgcacccatgccaccaagcagaatcaccgcctggtcctctcctgcatcctgcatacacctcagtgcgttctgagccagcgcaaacacatgcggcggcgcgtcgttcaccgtgtccttctcgtagaatggggtctgctccctgctcttgttgtacgcctgcatatgatcgggtgtgtagatcggcaacggcgtgatgggattcaccccaaccagcacccgatccacccacgtgtacacctgctccatgcgatacctcgcgcgcagcgtgtagagcgctacattctccaactgctcggtcgtgaaagtctcggttcggcctgcatcgccctgcaaataaaataagaaaaccaagaaaaataacaattaaaaactatgagagacctcaaaacggagacccaacttgaatctctcacgtttgtagccatcagcggcacgttgctgaggtcgtgcagctcgagcggcagcagctgcttggggtggtggtaggccggcagcttgaccaatgggcgtccgcggatggcgcgctcctcgccgtcctccgtgtgcacgaccgtcacgtgctgctcctggtccgagtcctcgtcgaagaggaagcccgtgcgcaccaccacggcggacgtgcagacgccgctctcatcgctcacccagacgaagtcgccctcctcgatgggcgtggggccggtggaggaggacacggacgccgaggtgccggcactagacgcactattcttgacgctggggcgcggggcctggcgcgccggctgcggagacgcctgggccggcgcgtactcgtcgctgctcaggcgctggctgccgggccgcgcctggccgttgctgcggtagctgcggcgcggttccgcgctcatggagctctcctccccgtgtgtgtgcaggcagcgaccgtcactctgtgctgacttgcggagctcttgcgctttgtatgcgggcaagagtgtcgcttcgttgaagcacgcgattggcagaaaaggatggggtataaggtttgaggagatacgctcgtggataagatttgacgttcacatggctacagtttgccaaatggcgcggtgactcacgcttgcagcttgctgagccagaacatagatcagaataaggcagagcgtgtgaagcgaggcacgcttgtatgtcctgctcgagctttggacgaaatgccaacgagatgacgaggatactactcggcgacggacgcaaacattgaaggtggcaaaacatgtttcacggtgactggaagtgcacacatagcagcacctttgcacttcactgatcagtccacttccgtcctgctccattgcactccgaggcgccgcagcacgcattgaagataccctggccgtgctgcgctgcgctgtggtgccgaggtcggatcccgaggttgcacatggttgccactgcgacacgatggtcatcttgccgattgcgccggccacgaatcgaccaatggcaccgcggcgagcgtctccgctgcggattcgcctaaattgtcgcatttcagcgaatgacgctcctccaaaaggcgtggacgcagccaatggcggggcggtcccgtcttcgccactttgtccttcctgcccccatgtctgacgtagccaaggcccaaagctgaagcgagcatcccgagtcggattcccgacgccacgtacttcagtctgcagctcagaattgcatttgcactcaagcgcccaagccccgcaaccaactaacacccacttaaggcactacctatctctagacgaccatgccgatcgagatccagaccccggaggagttcaacgccgccatcggcgagaagcagctgacggtcgtgcagttctctgcgccgtggtgcggcggctgcaagatggtggcccccaaggtgacgaagctgatggagagcgagttctcgagcgtcaagttcctcaaggtgagcgcggaggagctggaggacttctgcgaggagatcgacgtggacagcttcccgacgttccgcgtgtacaagaacggcgaggtggccgcgtcgtacgtgagctccaagttcgagaaggtggaggcgttcatccgcgagaacgccaactaagcggcgacagtctgctgctagctgccacaatggcggctgaagccgaggatacgcatgtatcgtcagcgtctgcgcccatgcgatcaacccgcgcttcgtttggtattgatcgagtggatcagcgcacgtgcgatgtatcgagcgcgtcgttagcaccccgttttgacgatggagaggcaaagatcacctaatgtatggaaatataaagcctttgcacccttgcgatgatggaactgtgttggaagtagtttcgttaggatgttggtgacgaagcgggtggtgctggttttagagtttggctgctaggttattggcgcggggctggattgtttaatcgattcatctggtggttggcaaaaccttggtgctgtcgaatatcagcatatcgcacgcttcccgccgctggttctcatgtggaatcactttcctcaattgttgcggcttttcatctactgatgccgtggaaacatgctaatgcatccaaccgaaaagtcggcaaagtgatgcatttatcttatgacgaggagacatggacgtcgcgaagatgaggttcatttgggtaggcggcaagacccaacaaggatctcagacggttgtactttaaactgtagcaaggttcaggactcctttatcgctcatagttacagtaaaagtcttttcgtcgttatgataaccaatgccgtgcttcacgctggatgcaacccagattctaggcagggaacacatgaagaggtaacgttacagatacaagcatgtacggggccacatacaagcacctacagcaccaacacctcaccattaataccaacatcctaacgaaactacttccaacacagttccatcatcgcaagggtgcaaaggctttatatttccatacattaggtgatctttgcctctccatcgtcaaaacggggtgctaacgacgcgctcgatacatcgcacgtgcgctgatccactcgatcaataccaaacgaagcgcgggttgatcgcatgggcgcagacgctgacgatacatgcgtatcctcggcttcagccgccattgtggcagctagcagcagactgtcgccgcttagttggcgttctcgcggatgaacgcctccaccttctcgaacttggagctcacgtacgacgcggccacctcgccgttcttgtacacgcggaacgtcgggaagctgtccacgtcgatctcctcgcagaagtcctccagctcctccgcgctcaccttgaggaacttgacgctcgagaactcgctctccatcagcttcgtcaccttgggggccaccatcttgcagccgccgcaccacggcgcagagaactgcacgaccgtcagctgcttctcgccgatggcggcgttgaactcctccggggtctggatctcgatcggcatggtcgtctagagataggtagtgccttaagtgggtgttagttggttgcggggcttgggcgcttgagtgcaaatgcaattctgagctgcagactgaagtacgtggcgtcgggaatccgactcgggatgctcgcttcagctttgggccttggctacgtcagacatgggggcaggaaggacaaagtggcgaagacgggaccgccccgccattggctgcgtccacgccttttggaggagcgtcattcgctgaaatgcgacaatttaggcgaatccgcagcggagacgctcgccgcggtgccattggtcgattcgtggccggcgcaatcggcaagatgaccatcgtgtcgcagtggcaaccatgtgcaacctcgggatccgacctcggcaccacagcgcagcgcagcacggccagggtatcttcaatgcgtgctgcggcgcctcggagtgcaagggagcaggttagcacggtggtggagaagtattcaatgtgctacatgcattagacttattgtgcagtgctccctttatggggtcgtgcctccactgccaacttcaagaactgctaccaggtcgttaaatcccttctgtgcggccacctcagctggtgtgaggccgtccttatctgttgcttcaagcgaggcgccgtgctgaagcatcagcttcacgcactcgacgcggtgccactcgactgcgcaatgcagcggcgaccgacggatggacacaatgtttgggtctccgccgaagcgcagcaacacttgcaaaacatcagcgtgaccgttggctgcggcgtagtagagcgcagtgcagccgtcaatgtccacgaagtcgacgttcaccagcttcttctccagcagcgcttgcacgaagtcggccttgccctccactgccgcgtagtggaacgggtgcctcgccataaccttgtccacttgctcctgcccgttgggatgcagcgacacgtcgtgctgaacgagcagctccagcatctccaccgacccattgcccgctgcctcgtgccacaccgtgacgcccatcttgtccactacgtacttgtcggctccgttgcgcagcataaagtccaccacagccgtgaacccgccagcgacagcttcatggagcggcacgtggttggtgcggttgctgaggttcacatctgcctgcgcttcttgcaccaggaacttcaccatgtcctcgtgtccgtcctggcacgcaatgtacaccgccgtgacgcccatctcgttctgctcgttcacgttggcgcccgcctccatcacaaggtatcgggccagctccacgtagttgcccttcaccgcgtacatgagcggcgtgcgtcctctcgtggtgtgacagtccaccagcagtccgaactccaccagcaggcgacagacgtccaggtgcccattgatcgcagcctcatgcagcggcgtgcgcgcgtatttcttgcgtccaccgcccagatggacctctccagcgccgagctgcagcagcgtctgcaccatctcgacgtggccttcactggccgcgaggtgcagcgccgtcgagccattgtggtcctgagtgagctgcaagaagtcgctgcgctcgtgctgcgcttcctgatccgattcctccagtagcgccgtcaacgccttgcagtcgccagccttggcatggtgcagcaactggctgccgcggtccaggcgcgtgttgtccttccacttggagcgacgccgtcccatacttgacttgaccaaccaagataagtgagctcctcgcgcgtgattgggtaattggaggacggtctccgaaacctcagtcattccaccttttgactcgcatgatgacaggaggagctggagctggagggggtagcgctagactactgcgactgcagcatgtaaggagccaaagggttggccgttgatagacctctgagtgtatgctgaagtgttagggtgttgtgtaggccattgcaagcatcagcgacgggttcttccagctgcggactgtgctgtgcgtgctgcagtgtatctgcagaactgtgcaatggggttaatgggggaattgctgcagtattttaggtctgggtaacgctgccgacgccattgagatcctctcgattgggtacatcttggcggtgtacgaagacaaggagggggtggtgctcactcggacgcagcagagtaagctacggttatagctgcagctctggctgtggttacttgcagcttatacttagggtaatgcttttgtaggtttgctggcggctgcaatcttcgcgggcatgttcactggagggctgctgttcggctccctgagcgactacattggtcggcggaagagtttgctctactcgctgctgctgaacggcgtctttggactcatgtcggcattgtcgccaaatgtgtacgcactcattatcttccgcacttgtgccggtgtcggtattggaggcaccgtgccggcaatgttcacgctctgctcggagcacgtacctgcgcaccgtcgaggctactacgtcacaatagttgctgcctactggatggtggtgagtaaagcctattgtattctactctcagtgataccaaagttctaacattttatttgtgctgactgcacaacagggggctgtgtttactgcagggttagcgtggttcatgttggggcgtccagaggcggcgtattcatggcgtgcatttgctgcaattatctcgctgccaagctttgcctgctgggctctcatgtatcgatacgtgcctgaaagcgcccaatttttccttcgacacaggctgctgactgctgcagaactggttgtggatactattcgagccaccaacgcttcggacgatgacggcttaaccgagtcaacgtcgctgctggctcggcataactctacaggggccagcaatcagtcggaagtgtatgctgagtcgtcaaacgctggcatccaagtcgagcggagcacatggaccgcttttggtctgctgttcgatccagtgctgcgcgggacgacaatttcgttgctgttgtcgtggttttgcttgagcttcgggtcgtatggcctcgcaacttggatcacgatgctcttcaatcgcatcggactggaggatccgttcgcgaacgcgtttatctacgctgctgcgaatcttcctggaaacatcatgaccgctttactcatggatcgccttggagggcgtcgtattcttgcgatctccatgctgctctccgctggctgtgccactggattcgcttatgcgaactcttccgcttcaggtgcagcagccatcgtactgctggccagtgggtttaacgccttcagcacggccggttggaacgcgattgatcttatgtccgccgagtcgttcccgacggacgtccgcacgactggaatgggcatgctgtcggcggctggaagggctggatccattgctgcgcagtttgtcaacggttatctcatcggtccacctgttcacgtgacgctgttgctggtcatcacggccactatgatgctcctcggcagtgcgagctcagtgtttgttcgcgacttcagcaacaagacgctcccagaatcagttgaagtgatgcgagtcacagaacgcgcgaagagaagcaaggtgtagttgccacatcatcgttcgaattattgatcccgttgtccaactaattccagctaactcgtaaggaaaaaaaagtatcgctcagtgttcatagtacgaagttcgagagatcgagttcccagtttacgagtgcggggctgctcggaatacgcggcgagttggaagatgctctgtcgatttggatctcggtcgctggcgtgggaaggtaagcattgagctgcgtcggtggctccaggactaactgttccggctcgtagtttttctggatctggctgacttggctttcgcttttgctagctctgctgatcaagctttcggcttggctactcctttcactactgcggctgcttctactgcttctactgtttctgctactcatgtcgctagctctgctactcgtgcgagagctgctggatgagctgctactgctgccttcgcttcgcttgcttgcatacgaaaaatcggattgggctctttgatgagaggcaaaagaagatggagatgagctccatgaagattccggccctggaactgatcgagaagacagtcgatctctttcccttctccgatgactggcagcaaggtctgctagtgtaggaccgattgtaactggcagtacgtttgcagcctgcgtacttcgaagacagacactccttggaggtgagtgtggtggcgtttggaaatcagcgactccaaaggatgcatcaaaccttgggtattgaaagtactcctctgtttctgtcgcttgatctcgcacgagtgtcaccgtttgtttctcccgagttgaagtgacagcattgttgctaggcacggtcccttgcgattgtctgtcttcaatcacctcttcatcgggttctggcgcaattttcatggcgtaaaaatcccgttgcttcctctccagcatatcctggaaaaactccaagctcgactctcctctaggagttgacgctaacgacgccacttcctcttgacggcgagaacgcggtcgttggtgacgttcgcctaaactttggtcaagccgttcatcggcttcgagcttggattcctgcactggggtactcaatttcaatgttgctggccgatggtactcgatcgcagcgttgagagcaacagtcagttcttcgagggtcatcccgcctgcctttcgcttgccacttgagctgcgcaacgacttctccgacccccactccgagctcgagtcaaactcgtcctcatcttcgtcttcactctcgccgtcgccgattccgtcaaagtacagcgactcgagatcttccagcacacgtctcgccacctctcgctcgtcctcaactgaaagccgctcggcaccttggccactccgcctcgcgttagctgctgcccccttgcgctcgtcataacgctgccacgaagagctgcaacttgaacacgacgagcccgaagacgccgcccaccgtctagaagagcccatgacgaagtgaaaatgctcgagcgaccctctgacatacttgaagctgtaacggacaacgaacagcattggtcagttaagctacatccgcttctgctattggtggaaatcgaggaatctgcattgcagattgctccgttggacgtatttgagtgtagcggtgctatagagcgtgacttcaacgtctgcattgaatggttaacacctcagtaaggagcacacacgcatgcacgttacatttcagcgggcttggatacagcacgtaagactggtgtgtgtatccgcttggcccccatctcgtaatcgatggtgtagctgatggccacactgccatcccaaaggtgcaggtccgagaattcgttttgtagctgtataaaatctaccaccggtatggcaaaaattcaagtcgcacgaccctagaatcacgtttaacatgagcagcgagtctcgacgcagcctgtgtcagacgatgatcttgggcgtcgcaatttggcggtctcgacgcgctacaagtgacatggagcctcctgcttcgcagcgagtgtatatacatgaacatgttgtgcatgatccgtaccgcattagataaccgatcagtccaacgacctagaattgttcttgtccattttgctggcgatggtgtgcactgaatcaaccaaccaacttcaacaacgagtactgttgcaaaagtgtagccatccggcttcaacttcaggaaattaatctccaatcgcgtgattaaacggttcgtgttatgaacactagttctattaatacctcaggtttgccacaaatgacaaggttttccatggtggaaatccattgttggactcggtccgatttgcatcacgttgattgatctgcggcaccaccgctttcagctgtcccgacatggcaaagccgaagctcacgacgaacctattttcttgtcggctgtcgcaacaattcgcagagtagctgcaaccctcgtcgttgtagacagtggtgttcgatagctacatctatctaccccacaccgcgcttgcggcgttatcggcgcggcgttggtcatcctcattattgaaaatcacagctacccagcaagtccacttcaaagcaacgaactcaacttcactatgaacatccaagctcttctcctcgtcgcggcttctatgactgcgcgcgcctccgccgagttcaccgtcacctctgcagtcactgaagctgccacctccacctcggagaacgcggccttcgtcaagcagtggacgctgagcgcggtcaactccgccgacaccatcgactccatcgacctggacctcgccgggcgcgtgtacgtgagctacgtgagcggcctaccgagcggcgtgctcggctacgtgaacgtgtcgggcgactcgcagaccgtggttgacgctgtgactgtcaccaacgatgacaccaatgacaatgatgccgacgatacgaatgacacggatggagagctcaacatccgcatcggcaacagcacgtctaccgctacgacgctcagcggatacctgctgacggagatcttcctggcgtccaccggcgtcgtgacggacgtcaagagccagcggtcggcccaggtggtggtcgaggacggcgttctggcgtcgaatagcaccaccgcggagctgcaggtggagacgagcggctccagtgccgtgtacgtgtcggcggccagcaccgacgtgagcgcgcgccagctgcacctggaggcgaccggcacgtcaaagctccagttcatcgttgacagcgtgtcggtgacggagctcgagctggagacgcagggcaccggcaccatctgcatcagcgcgcagcaggtcacggccaccacctacgagggcaagggcgccagccgcatctcgatgcccaacgcgtccaacaaacacgactccacggggtcgctcacctgcgacgagtccagcgttcctgcccgcgagccttcgtgcgtgtcgagcgcttgtgcttcatcgtcgaccgcgggcacggccggatcgacgaccggcaatgtcgactcgagcgagtcgtcaactacccgcctcgctgcgctggccgctgcactgatcggtgctgcggctgccagtctgctgtagtcagcaaatgatataagccacgcatattaggcatgacgaaggcgaatcgattcgatcgattcgaccgattcagcaaagacaaccaaaaacacagcattatgactcaatacagctctatattccttactaaggcagtcttgctatgtgtatattgccaagggtatcaggttacgagttactaatttgataatgatgagccttacgaaggatgtcaatataataggttataggtttccacgtcttcctaagtgaaacgaaactactaatcactttcaatttatcccccctcgccaaaaatgagctcctccgacgccaccaaggacaccaccacgccatcgaccccgcgcccggtcatttacctcgcgggagactcgctgactcagcgaggcaccgacccggagaatgccggctgggtcgcgttgatgcagcaccgctacaaccgctcggccgacatcgtcccccgcggactgtcgggatacaacaccaagtgcgtctcactgcaccccacagcttcctaccatcgattctatttaactaacgatgtccctcttacattgttgctgttgcgactgcaggtggttcattgagtccgctctgcctgtgatcaagcgcgaactttccgctgaagtgcgttcgcccatgctgatcacgttgtggctcggcgccaacgatgccgccctccccgacggcggcgcggcgcgtcagcacgtccccgttgctgcgtacaaggagaacctggtcaagatcgtacagaccttccaaactagcgcgcccaacgctcagatcctgttgatcactccgccgcacgtcgacgacgctgtccgcaagtcgcgctcgcctgctggacgcgctgagcgcaccaacgccgcggctggggaatacgcgcgcgcgtgtgtggaggctgctgatgaactgaagctcaacgtcgtggacctgtactcgttcttcaacgccatgtccgagagcgagcgtgctgcgtgcttggacgacggactccacttcaccgcgaagggcaaccgcatagtggacgaacaagtgcacaagaagatcactgaagcttttcccgaagtggtgaagcagctcgagacgtggcagctcccggacttccacgtctggatggatgcgtagacagtagcaaaactgccatcgagtacagctttgctccaggccgcacactcgcaccggttcttaccggttggttttcccatctgccattccttggtatccatgccacgtgtgacgctacgcagcgtggtgccggttgttgtggcctttgctgcagtctactttgcgtcgtacttcggggcatgggagcaaacgctgcagacaatttgtagcaatcctgctgcgactcgcccgacgttgttgctcctgggcgactcgctcacggagcagggcgttgaccccgacaagtctgggtgggtgggtggctctgctccaaaaccgctaccaacgatcggctgacgtcctgccccgcggactgtcagactacaacaccaagtgagttcgttgactcgctatgtgaagatgtacaacagagcggtaactaacgcgtttcaatgcaaactttactcgcaggtggttcatcgacttcgctctgccggtgatcaagcgggagttgtccagtgccggcatttctccatccctgatcacgctttggctcggggcgaacgacgctgcgctcgcagacggaccctcgtctcgccagcacgttccagtggatacttacgcgtcgaacctggagggaatccaggaccgggcgactcgaccgatcaaacgccatggcgggcgaatacgccaaggcgtgcgttgtcacagccgagagactcgaagttgcagtgctggacttgcactctctattcaacgcaatgtcatcacgcgaacgggcgttggcgctggaggacgggctgcacttgtcggcttggggaaccgactcatggatcggctgctgcgggcgaagattgcagacgcgtttcctacgctggcggcgcgcctgcaggagtcagcgatccccaactgggatcggctcacggctcacatgaccaatagatcttgagccgacacagccacgggcagcaacgagaatcaacttcgcgcagcaacgatagtcacgtattacggtgtgagtttggcttgcaatcctgtttactttccagacgagtgagtgctttgccagcggtgcaaacctatcgagacgctcattcccttcaccggatagttcggttgcacagcttcggtgccaatcgttcccaccgtggtcatacaagttgggatgctgccaacttggcagtgccaagataacctacgtttcgctaacagagtgcgggtgcaaattgcatcttgaagtgtcacacccagctgataggactgttctcaaccatggcgaatgcaatgcaaagtgctcaatgcggcgctaaatgaagttcggcaatgacaacaagatagatatcctgtgcatatccatccatacagtctattagagaataggcaacatgaaactcgagctcctcgtcgactgcacaatgcgcctccgctccgcttccttgtccaacgcgaccctcctctctggtgtgtgtgacaccttaccacgtctccacccgaggtacgggtaggtacaggacagatcccaaggcatcatcaaacgtcagtgatggccgacgatcggtccgatgtagcgactcgctggtcactgccgaaattgctctccgtagggccaccacctggtcgaccaccagcaccatgatcccgagccccatcaagcccaccaagccctctcctctgggcctcagcctcccggtctccgttaccagcccgtcggtcaacaccaagcgcagtctgctcgcgtgcctcgtcctggccgcgtacatcgcgtggtcgctgggcgcctgggaggcgattctcgttgagagcggcctgcggcccaagctgcggcccgtgctgctgctggccggcgactcgctgaccgaaaggggcacgaaccccaagatcaacggctgggccactctactgcagaacgagtacacgcgctcggccaacgtcgtgccccgcggcctctcgggctacaacactcgatggtatctcaagtacgccatgccggtcatccagggcgagatcatgagcggcagctactcgccggcattgatcacgctgtggctcggagccaatgatgccgctctacccaatggcagcaactcggaacagcacgttcccattgacatgtaccgcgacaacttggtccgaatcgtgcggcagttccaggccatggcccccgatgccaggatcctactcatcacgccgcctcacgtggacgatatggcccgccaccgccgggccatgaagaacgaagtggacaagaagggcgtgcccgaccgcaccaacgagatggccggcaactacgcgcaggtctgcgtcgccaccgcgtacaagctcggcctgcccgtggtggatttgtactcgtatttcaacgacatgcccaagtggagacgcaacaacctgctcgaggacggactgcacctaaacacgaggggcaacaagctcatgttcgaccagctcctggacaagatcaaggccgagttccccgacgtggcgcgcaagctcgagcgctggcagctccccaagttcggccggttggtcgagagcgacccgtgggcgccgacggacgacgccgacgcccacagcacgcgcagtcttcgagacgattgaacacacagctagctaacttatatcatagaactcgtattaagctgaagtccctggagactcattgttgatcagagtgttgactaagttaatcaccacagtggggctcttgcttcatgtggtcgcgacccgatgacccggaaggaagcaccttccagccggaattgcatcccagcgatggtgaaccagaggcgttcgccatcagatcagcactcactgctgaaacccccggcgcttgaacaccatggccgctattcgcgagaagtccaagctgccgtctccgctgtcggctctgtcggtaccagcccgaggtttaaccgcgaagaccaagcgcagtcttcttgcgctcttcgttgtggccgcatacgtcgcgtggtcgtttggcgcgtgggagtccgtgcttcaaaggaccagcgtccgccctcgccttcgaccggtgatcctgctcgttggagactccttgaccgagaagggcacgatccccaagacgaacggctgggtcactctgctgcagagcgactatagacgctccgtcaacgtcgtgccgcgcggactctcgggctacaacaccaggtatgtgggagagatactgccgatctgggtagcatttattaactcgtgctggttgttcgtgtagatggtatctgaagtatggagttccagtgatccagggcgagatatcgagtggggcgtacatgccggcgttgatcacgatttggctgggggccaacgacgccgctctgcccaacggaactgcagtggcgcagcatgtgcccgtcgacgactacaaggggaacctcgtcaagctcgttgatactttcaaggcgatggcaccggacgccaaagttttgttcatcacccctccgttcgtcgatgatgaagtccagcagaagcacgcggacaagtacaagggcgatatgaagggcatggtcgcccattccaacgcgatggcggggatctacgcgcgcgcgtgtgtggacacagcgaaaaccttggggcttcccgtgctggacttgcacacgtacttcaacaacctgaccgagtacacgcacaagcatgtacttgaggacggactgcatctcaacctgaagggcaacaatcacatgtacgagcagctccgccagaagattgaggccgagttccccaacatctcgcacaaactcgagcggtggcagatcccgagctacgagaggtgggtcgacttggatccgtgggttccgaagaagacaaactcgactgaaaacgccaattgattgaaatttatcgggtaattgttgtagcctacttagcacatgatgaacttgtcatgatttcgttctggagtgcgctcttttggttgtagaaatctctacagccacgtcgctgtcagtcgaaatcctctccatcgaggatcaccgcgctggcggagttgttgccatggcacaccctcccgaaagtccagcacagtcgtcgccttctgagtcgtccagctcctcgagttgctcgttatcttcttcgtcacagccgtcaccactgccgctatcgtccaagcctccagcaatgccaacccgtaccagaccttccagcaccaagatcattctgttcgcgttcttcgcgcttggtgctttcgtcgcgtggtcgcttggagcgtgggagagtgctatgatccgagtcggctaccgctatcgattgcggccgctgctgctgtttgtaggcgattcattgaccgagcgaggctccatcccgtcttccatggggtggctctcaatgctggagagcgactacagacgctcagtcgacattctgggccgcggactctccggatacaacacgaaatggtacctcaagtacgcgatgcccgttatccacgacgagatcacgagtggcaactacatgccgtcgctagtcacgatctggctgggcgccaacgacgccgcactacccgacgggagcatgtcggagcaacacgtccccatcgcagcgtaccagtacaatctagtcaagcttgttcagagttttaaggccattgctccagccgccagcattctccgcgttgcccctccacacgttgacgacgaagtgcagaagaccaatgccatggacgagaaaggagccaagaaagggttagtctctcgctcgaataaagtgacgggcgagtacgcgcgcgcctgcgtcgagacggcaagtgaattgaacgtcccggtgctcgacttgtactcgtacttcaacgacatgtccaagtcggagcgcaacgcgatgctcttggacggactgcacttcaacgagacgggcaatggcgaagtctacaggcaactccgcgacaaaatcgactcggacttccccgaccttagtctcaagcttgagcggtggcagctcccgcgcttcgaggactgggccgagaccgacccgtggactccggaggagagcaccacagtggacttcgccaacgtccgagtgcgcggctaacaaacgagtcccaaagtagtctggctgtcctagacagtccacacgatctgtagatccccccttcatgctgccgctccgtcgtctcctgctgcctactggaggccgctacgtgtccgccgtggcgtcaaccgggtcacgagcatcctcgtcctggacgacacttcagcgtccgaagatcctgctgatcggcgactcgttgactcaagagggcaccgatcccgatctcggcggctgggtgtgtcagctccagcaccgctacactcgctccgccgacgtggtggtgcgtgggttgtacggctacagcaccgagatcttcgtgcgtcacgctcttccaggtctcaagagagacttggcctcatggaccgaccccccagcgttggtggctctctggctcggtggcaacgactcggcactgccaacgggcttcgaggctgcgcttcacgtgccgatccccaagtaccgcgccaacctccgcgaaatcgtgcaagcaattcgagccgaagctccagagactgcgatcttgatggtcactcccccagcagtgaacgactcggctcggctggaagtttattccaatgaggagctcgacttctctaatgaagcagtgggggagtacgcgcgcgcgtgcgttgaagaggcgaaggctgcggggctgccggcgctcgacttccacacgatcatgaacgacttgggggagcaagaacgccacgcgtgccagtacgacggactgcacttcaacatgaagggccatgcgctggtcgctgacacaattctcgctacgattgagaaggagtttcctgctgtggctaagcaactagacgcatgggagcacccggactacctcgaactgattgacaacaaggaggaacagtagagtagaatcgatgcaaaaatgttcacgcctgccattcactttaccggttttaaattattcagtcttgggtttgagcttgtcgtcatctgaccgcttcatgcacttgagtatcaggaaccagtccagggcaaacagcacgagcacgataacgacgacgggggctgagcgcaccgacaacagcgccacgtttagcacggctgcgagaccgagcttccattccagggggaggttctgtagattgggtaggcttccaatggcctcggtatcattctcaataagagaagtagtagacacgataggctgcaccacttcaaagtcgtcgccctcatggagctcgtcatcggagtccgactcggattcatcgtcgtcgtcgtcgtccgagtcttctttgttctccgagtcgtcatcgtcgtcgtcggactcttcaattgggctcagaggctgctcgtggttcacggatgagttcatactcgcctcggcattgccattcgtatccggtaccgctccattcctccttggcgtgtcatcatcagactcgctggcgtgggaatctttccgcaccgccgccgacttggcagccttcagcatggccttcttgctcttcctgccgcgacgtgacagttgcgccgtcaaaatggcagtcgagatggcgttttcccactcattgtactcgctttgagacggcgcgcagatcttccagcagtgcttcttggtgcggatcaggaacatgtacggggtgggggccgcgtccagactcaaactgctggtaatagccagcgacgcgtgcttgttggtcaaattcagcttggccagcgacaacccgcgacgcgcagcagcttccgagtcgtagtaccgtaagatacacttgcgcggatctaatacgaaccacttgcggtaccaattgcgtcctcgaaatttcacactgcgttggatgatgagagacccagccttgactggaggcatagcgtggtccgacgtctgcacttcattcgggatgttgacggtgggtgccgacgtcctccgaggcaacaaatgccgagactttccgggagttgaaccatcctcgttgccatgtttgccatgcgcaaacggtttagagagcagcgagatggacgagttgacgatatgtcgagggtgcatcgagttgcttcgagtgtgctcgataaaccccaaccggcggttgtccagctccgagccatccaacgcggctccactgccggtagacgccgcatcactgccatcaaccgaggcaactctatcgtgcgagcctgcaagttgcccattttgttgtggtgtcccattttgcgactccacctctgcccagtaaatgagcacttttgccttgctccaggtataagtgttatcccacgttagagtgcacgtgccaggggtggtgcagcgataaaaccccttaaccggcttcacataggtaccttcgcgggaatacgcgcggatcatttcaccttcgaatgtggcactaaagccgatgttgtgcttctttgtggtaaattgccaggacgccacatctcccgcggcgctgagtggcaacgtcacggagaaggactgacccgctctcacagtcacaattgtgccgggtagcccctccagcatcctcgacggcaccaaaagtccgtcctcgtcgtcactgctctcttcgactgcagtggaggcctccagaaagtcacggagcacgttggacgccttcacttcgggaatttgcatcaattgggccaagtacgccgtcaactcgttgcgcttctcctcgatgtactcattgtcgtatcgcttgctgcgcattgcgggcaaatctttcggcaacttggacttggggtacgttttcaacagctgaaaatgggtacaccaccaacaaaattgcccatttgcatcttggttagcaccatgctgccaaatgcaacattgccctcccccacctcacattaaacaccacttaaagttgccacgtactctagaatgcagggtgcggaactgtttgtagcttcgctgcaccacatgccgccgctccgtaggctcctccccgtcgtgctcgccctcgaagtacgcggccacagtgaacagcgcgtagtagccaccgccatcgggcaggtagcgcagtgggtccagcgccttcttcttgggcgagagccgcttctggatcttgtgcgcctcgatgcgacacgccacgagctgcttcttgccgcccttgggaggcgacctgtcctccgcgtcggcggccattgcaacgctctccacgggcgcggcgtccatggctacgtggagatcgactcttaggttgtgtatagattgtgtgaactttaagtgaatctatgtgccagcccgatctttttcccgccaaaagccgtagaacaagttcaagttcgaaccgcctgacgtatacgtacgtcaagcaaagatccggttgcaagttgcattcttgcttgctgccgaccacttgatgtttgtatgtggaaaggcaaccttgacaaagcgaagccagcggctccttgcttgccggcgcgtcaagatgcaatccggttcattccgcaatttgccgcgcgcctctcaagccccccgccagcaacgcgcaacacctaaaggttaagtgaaaagatgctcaccattgcctcggccgaagacttccacactgcggttgcctcctccgcctccagcggcaaggcgctcgtcgcgtgcttctccgccccgtggtgcggcggctgcaagctcgtggcgcccaaggtggcggagctggcggagcagctggaggccagcgccgacttcgtgagcgtgagcgccgaggagctcgagaagctctgcgaggagctggaggtggacagctacccgcacttccgcgtgtaccaggagggcaagcgcgcgggcgactacacgagctccaagttcgacaaggtggacgccttcatccgcggcttcgtggcgcccgagacgctgcagcaggaggagacgcccgagggggatactgccgagacagaggaggccgcagagacggccgaggatgatgaaggaactacggaggagctggaggaagaagagggggagggggagggagcgtccaagaagcgtcaggagcgcgacgagatggaggcaaatgatgagcatgccgccaagaaggccaggacggaggaggagggtcaagaggtcgctgacgcgccgaaggaggaggaggaagttgctgctgttgaggaggctgagaaggcggaggaggacgtggagaaggcggaggagactgatgaattaaaagagaaagagcaggtaattaccgacgacgtggcagctgatgacgcggaaaaggccgacaaggaggcggttgcagctgaggaggagacgccggctgagaagggtgcggaggaggctgcgcctgtggacaagctggaggcgagtgaggctgctgaagctgaggcagacgctgcggcggcgtaaatggctgttgcatgggagtgggagttggggagctggcccacgatcgatgcattcatgatgctgtggatgtccagcagcgcaagttcttatcgtaagtaaaacaataaacacgtactattatttgggaaactcaacagcttgtttcccttgttgcaagctgctaggcaactcgagcttcgttcaagcagtagttgtattttgttgtacttcctccctaggcggctttgccttcgaggacctccaggtatttgccgtactgggtgacgacgctgccgtacttggtgagcaggccctgcgtctccagtcggttctcgatgtcctccttggtctgaccgttctgcagccagctgcggaagacctgcttggcgtacgcgtggtcgctgaggatcttggcgaggatcttggcgtcgagattcttctcctccgccgcgcgctcttcggccgccctctcttcgtcgccagcagcgagcacgctcggggttttgtggcttctcaaggccctcgcgttcgaggcgacgagctctgaagaagcagaagccgccgacacaagctcgttgctggcgaggagagtggccgcaaccattaacaggacgtagctcagatgcatgattctccttttaatcaggtcactcgatgggcttgagcttgggctggcgagttgcagactgaatcccttcagtctaacagcaaacgacgaatctgctggcagcaacgcccaggatcaactccctcgtcctctccacgcgaaagaggtcaagcagagagaagaagccctcgtgaacgaccagtagtcgctcaaaggcaaggcaacgcagtgtgtgtgtgtgcaacgcattagcttagaagtctacatgccagtctctatgtgctttttcttcttcttcttcttctacttcagccgcacgacctcgacgaccgcgaacttgtcgctgtccttgatggcggccttgaactccttcttgagctccttctcgctcttggaggacagcgccttgtcctggatctgcttgagcacctgttcccgcagcgcgtccatctccagctccttgccagcgtccttcagcgccgacttgatgagcttgctccacttgacgggcttatcctccgtcttgctcttcttagcgttcttctcgtcctcctccttctccgtctccgctggccgcttcttgctcgcgttctcctgcaccggagcggccgccgcgggggtctcgttgctctcgggcgccgaggccttgaacgccgtctcgtagatggtccaggcgcgctccacaagcgccgcgtcgcgcagcgccaggctgttggacacgaagttgacgaacttgttcttcttgcggggcacgttgtcgtagccggctatgcgcgtgagcacgtcctgcagcttgcggtcgtcggggcacgtggcggactgcacggcgtccatccagcgctcctgcggcgtctgcttcttgccgggcttgcccttgttcttgtcgccctggtacagactcttctcgtacttctcggcctccgagatgcagctggtgtgcgccgcgtagtcgttgccctcgaacacgacgctgcagtccacgcagctcacggcccagcagttgcggcagcggcccgcgtgcgcgtccaccttgttcttcttcagcgtctcattgcagccctcgcacacgaagaacaccatcgttcgtctgccgcccaagcgcactagtacgtcacgccactacttgagctaatgccttgcaagcgtcgccaatcaaatctactcgtctaagtatacatttgggatatgtatacatactgaagcaacttagtaaggaatcggcagcgttgtatacttaaagaaagctatatttggcgccaacttcaccttcactttctgacccaagctcactactcgattgtccgccgctgcaatggtgaagccaagtgacgccaagacgccctccgcctctgctggggcagacgcccaggtgacgggcaacaagcgcccgcgtgaagaagaagaaacagctgagcagcagcagcagcaaccgacggccgccaatgaggatgaggacgaggaggtggtgacgctctcggaggtgctcaagcacaacgagcagctgacggagacggcggacgccgtgctgggcgacgccagcgacacgcactgcagctaccccatgggctacatgcgccaggccgtgtacgcctgcatgacgtgcacgcccgaggcgctgcagaagcccgaggcgcgcgcgggcgtgtgcttggcctgcacgtacaactgccaccaggaccacgagctcgtggagctctacaccaagcgcgcgttccgctgcgactgcggcaacgacaagttccccaagagtacgtcgctaaagttgctgcaacttggagttattggtattattgaccttgagttgcatgcatggtgctgcttgttgttgttgaccaggtaacccgtgcaaactcgagacggacaaggccaagacgaacccgcgcaacacgtactcgcaaaactatggtggactgtactgcaactgccaccggccgtacccggacccggagcggacgacggaggaggtcatggtccagtgtgtcatctgtgaggactggctgcacgaggagcacatttccaacgacgtcgagaaaaagccggtggccagcgaggaatcagctgagaaggaagctccagcaacggagacggagaaggagaaagaggcgttggtgactgactcggacaaggagtcgcctgcagatgaagacgcggatgcagatgctgccacggacagtggcaacacggtgtctcctgagagcttcgacgagctcatctgcctcgagtgcatgaagaagcacccgttcctcttggcctacacggtcgagacctcggacacggaggcgactgaagggagagacgatgccgccaaagagaagacagacgagtgtgtactcaaggcgaagcagaagcagctagaagcggaaggatcgacgactctgcggccgaccttttggtcgagtgagtggcgcggtgagctgtgccagtgctcgtcgtgtgttgctctgtttgaaaagcacggcatcgcggccctcctggaccctgaagactcgctgcatgtgtacgaagctaccgcgagggagaagaagacggcgtcggacgaggagatcgctcaacgcgccttcgccaacaagctgacgcacgagcagcaagttgaagttgccatgggctacagcctcatgaagaacaacctccagcaatacctcgcaggcttcgcggctagcggcaagacggtgaaagcagaggacatcaagagcttcttcgaggggatgaaccaggccaagcgccagaaaacagagtaaaagtggcggctgatagccgcaagacagcgcagtgagaggcagataaaggctcgtgttgctgtcgcttgtgattcataataacgactacttcgaagtgccagtacaatactgtagcttcactgagtgttcgtgtttactgctggaacttgcctaagaactcgaaaaccttggccgacagcgtaggctcagcctccagcgggtcaccaggcttggcagtctcgatcttggcagccagacgtgcaccctggtcaatggcgcgctttgcatccagctcgccagcttcgtcggcgccaccaatgcggaagaccgtgacgcccttctcctgcagcggcttctcgagctcacgcagaggcacttggccagcacacacgatcacgttgtccacgtccagaacctgcttctgacccttcttgtccgtgtagtgcaggcctgcgtcgtccaccttgtcgtacgacacgccgccgatcatcttgacgtctcggtgtttgagcgaaagcctgtggatccaacccgtcgtcttgccgaggtccttgccatgcttcgtcttcttacgctgcatcaggtacacctcgcgcgggggcggagggatgctgggcttaatgccagccacacctccacgcaccgaattggtcatgtcaatgccccactcccgagcgaatgcgtcgacacttgagcttgtggattcgcccacgtgcgtaatgaactcagcaacgtcgaacccgataccaccagctccgataacggcgaccttcttgcccaccggcgccttgttcttgagtacgtcgatgtaactcagaaccttcgggtgatcagcgccggggatcttgagctcgcgcggcagcacacccgtggcgataacgaccttgtcgaagcctcctgcggccagatcagcagattcaacacgttgaccgagtttcaccttcacgcccttgagcttcaactgcttctcgaagtagcgaagcgtctcgtagaactcctccttgcccggaatggtcttggccatgttgaactgacctccgatagcgtcggcttggtcgaacaaggtcacgtcatgaccgcgcgttgctgctgccgtcgagaacgacaagccagcaggtcccgcaccgaccacggcgacacgctgcacgtctgtagcagagataaagacgcagttaagacatgtgccacgtggttccgcctaaatgcaatgacttaccgtcagtcggtgtgtagttgagcatggtttcgtagcccgatcgagggttaacaaggcagctagccgtgatgcccttgaacgtatggtccaagcacgcttggttgcagccgatgcacgtgttgatctcgtccactcgcccttcttccgtcttacgcacgaactccggatccgcgaggaacggccgagccatggacaccatgtctacaagcgcaacatcagagcagatatgagcacaacaccattatcccaccgtacaaggagaaatcgactcacctgcgtgaccatcagcgataatctgctcagcgacgccgggcatattgatgcggttggtcgtgatcagcgggatggagacctcgcccttcatcttctgcgtgacccacgagaatccaccgcgaggcacactcgtcgcgatcgtggggatacgcgcctcgtgccagccgatgcccgtgttgataatagtcgcgcctgccgcctcaatctgcttggcgagcagcacgatctcgtcccaagtgctgcccttctccaccagatccagcatcgagaggcggaagatgatgatgaagtccttgcccacagcagctcgcaccgccttgacgatctccacggggaagcggatgcggttctcgtacgctccgccccactggtccgtgcgcttgttcgtgtgctccacgatgaactggttgatgaggtagccctccgagcccatgatctccacgccgtcgtagcccgcctcacgcgcgcgcgccgcgcagttggcatagtcacggatcgtgctctccacgccggagctggaaagctcgcgcggggtgaaccagccgatgggcgccttgatgggggacggcgccacgttgaacgggtggtacccgtagcgtccgctgtgcaggatctgcatggcgatcttgccgtcgttgtcgtgcaccgcctgagtcacctccttgtgcgcgttcacctcgccctgcgtcgtcagtttggcggccagcggactcacgcgaccggcgcggttgggtgcaatgccaccagtcacgatgagacccacgttgcccttggctctgcagtggcaggatagcaattcgtgtagtaaggtcagtgcatgcaccaccagaagcggttggtagatgttgctcacctttcggcgaagaaggcggcgaggcgggtgagcgacttgccctcctccagacccgtgtgcatggagcccatgagcacgcggttcttgagctgcgtgaagcccaggtccagcggctgcagcaggtgcgggtacttgctcatggtcggtctcttttgcgcggcggtttgtcgactgtgcaactgaagctctctttcagacctcacgtcggaatccgacgtgaagatggaccatcggaatgggatcctgaagattggggtccacgacaccagcttgcaggttgaaagacgacgtcggcggtgaagggatgttcacgtcaggtccagtcagcttcaagtgcaatcgggcattcgagctcacggcggtgaattccaaggcgaggggtaaaagctcaggtagatatgcatgcagccagcattcacgactccgatgaaccaagatgaagacgagactcaggaaacgaagtttacgcattggtgttgcgatcaggaaaccgaaggaactcgagatcgcctgcaagcttgccttgcatccgattcggcgtacatggctacattcacggcacccgcgtttggtaagttcgcataggcttgactgttaagttcggattgtagaaggttcatgattggttgaaataccacgtgccatgccaccaatggcacgatggctacgcttcctgccacaccatcgctacacgaaagccccccgccgcacatcgctcgagggccgcagactctttgaacggccagcagctcagcaggaacttcaccgaccgccaccatgaccaaggagtacacgctggacgagatccgccgcctggccgacaccaacccggagaagctggcgcaggagtaccaggcctcgcgcgccgccaccgccaacctcgtggaccgcgcccgcgccggcatcgccgcgcgcacggccaacccgcccaccaacaagttcaacgcctgggcgcagggctacggcaaccgcttcatctacaacggcagcatcaagccgctcgtgcacatgatgctcatcgtgggcggcgccggctgcgctgtcgagtggtggtgccaccacagtacgtttgatcccgccgcgttgattaattatgaggggccttatttgctaacggtacctttgattttatcttattatttctgcaggacacgctcacgctgagaagaaggaggagcaccactaagtggagaaatctctctctatttcttcttcagcggtctgtgacgtcgctgggtcgggtctgacaaaatgtggaggacacccttcttctccgtcttcatgattagatgagagaggaggaccggcgaggtgtacagacagcagggaggcaggacggacgaagccagaagcagttagtgccagctacggtagcgctagcgacgctggccgatccttggagtgaaaaaatgacgcggcgcgtaaataagaacccccacgcctgaagccaaaatccaaccatgaagagcgcgaccgcaagtgttgtggctgtgtttgttgatctcttggtctctctactttgataccattctcgctatctttccctccagatgcagcaagcacttcaactaccgtagaggacttctctatggctttaccgccggtttttcttcccgtttaacattctccgtccttgtcttcagctgcggggaagcgaagttcacgtgtcaggatcttgccgtagccctgcacgaccagtttgtcgtcgaacacgagcactagcgcgtgtgccgtctcggacggagcgcactcgaggatggcgtcgcacactacgaagtgcacacctttgttgtgcatgccgtcgtgggcgtgcacgtatccgtcggcatgtgagtggcccgagaagacgacgcggacgcaggcgtagcgtcggatgagctccagcacctccgggtagttccacaacaagctcgaaggcgtcggcgacgtgctcgggtggatcgggacgtgcgtgaagatcaccacgtgctctttcgcctctgtagccttgaggagaaccccctccagccactgcatctggtcacggtccactgctccattaaaggcgacgaacctccgctgcgcttcctcgagacccgtcggagagttgagattctcgttcgggttcacgcggcgcagcagagcgagcgcttcctggtacaccgggtcggtcttctctcgtccgaggatcgacagtccatagcagtccagcaccacgaagcggaacttgggcgcctcgggtacttggaagtcgtagtaagtgcgaggtggtgcctcctccttcgacgtcttggacgactggtacaccagttccttctgaatatcggagaccgagaagttgtagagctcgtggttgccaaccaggtgatgcactggccccaccgcgtcttggaagggaacccacgccgccttggtgctctccagagcttggcgggacgtggacgcgggtcggttcttcccgtcgatgagatcgcccaggttcacggcgaagcggagttgactctggctctgggccatgcgcagccactcggccactacggcttgcaactgcggcagcgcgttgcggtagtaccgctgcgaggtgtggtggaagtcccagccgtcctccacgtcggcgtactgcacgtcggtcaccaggccgaaggacacgagcggagtctcctgttgcgctgacgccattcttgccactgtgctcgatttttgactggctacactatgccgcaccattccgattggatggagatggctccgaggaaggagtctaaatgcgaaggtgttgggaggcttatatggcaacgtgtcacggaccacagcatggcacggagtctgggatggagtcgtccaggtatcgtgtagggtggaacaagagctactgtacgcgcgatgtgagcgagaagggcaacctggtggcgatttttccaagttaaagtgcaaagtgcactttaccagcaaaaggcaatagaggtgcgccatttctcgaagagcgagatccttcaaacaagaaaaccaggaccatttagatttggcgcttttctcatggttagaaaagagcgcaatggcttcggcaatcaagcacgtagctagaatcaagaacgtgattgcaaaatagtgttgctttgttcggttaggatgttgactagattcaacgtactcgaagtccaaaatgatcgaggctatcgcagctgcaagaagttatgtcatcaagaagcagggaggctgctcatcctcactcgagagccaacatgcgcgtggggaaccctgctggagcaggttcgagcgctgtgaccagtttagttgtaccagccagcggctcgaacacggtcgcaatcggtagcaccttgtcttcgccactaacgccgtggctgctcacggcgtcaggccccgtcgtctccatcgcgctgctggtatcggggtcgttcttgctgttcttgctgttcttgctggaagtttccttgccggacccatttctttatccgtaagagcttttaccactttgtcgtcatttcctacaggaatttactctgataggcatgtcatgtaaagccatgactagcacttcgtcatgttcggcaagagcaccacagtcacacaaataaggtaaactctaagaacaacagccttccttctcagaatcgcattgctgaacacgaaaggtttatgtcgcccgagatgaagaacccaacaagagcggcgccagcggcacgaagaaggtcagcgctaatggatagctctcttgtaagcaccatcccaaacaccccactaggataacaaactgacttaatggagacggctttcgtctacacttgtcggaagttcggtaactccatgctcacaactccatccaagttttgatatttttgcgaagcaaaaatgcagatcacttcttctactcttctactctgattacttttccttagcactcaaaaatggaggggatactggggaaatactctaaggtctgatctaattctgaagtactgagagctttttcctggcatatatatagcgaacaggagctccgagctgcctttcacagcaaataagctccgacacttgagagcatgaagttgccagcttcgacgtatccggccgaggagatggcggcgaagccgaacttccgacaagtcggaacaaaggcgacaggctccgttatgcgtggagcagcagcgctcaggcaaccgccgccagaccccagcatggtacggttctctgtgcaactttgaattagggtgaaaggtatttgatgtggaagccgcgtgcgaatgagcagaaagtgtcgtcgattccgtccaagtacgagactgttttgcatcgagacccgaatgagcgcaatggttttggtaatcgaacgctacgtttcggcgactgcgaggtgtgtgtggctgcctagtgttgagatttcgaagagatgctgacgtgcagtttacttttccctactgcattcgctgcagaacgagctcccggggcccggtcagtactacaagcaaccaagtctcgtaagatccactgtcgattcaggatcagtatctcgtttgggctacagcacgggatttgtgtccaagtcgaagcgatttaatgaacaggtcaagctggttgtacctggcccaggccagtaccagccaaacaagtacaaaacctcaaagccccactcttcagcaacaacgctgtcactaatttattgtgctttcgtgttcttgaaaaaaaatagagacgatcgcaagacgttgaacaggaagcacggcatgagcagctttgtcaacaccgtacgctgctgtgctgcgcgctagccgctactttttgatctactaactatgctctttactattttgtatgcgtgcagcccaagcatagcaacaatcagagcccaaacgcatccgtcccaggcccagcagactacaactcggcgcagccatcgtcagcatattcgcacaacgtctcaaagtctgtattctcctcgaaaacatctcgaggttggaatattcctaccgagcttcctgctccaggacagtacgagaaccccattcagctcggtagatcgcttcgtgggaaccgatcaccccattcaatattcaaatcgggcgtcaagcgactaggatcggatgcaacctttactcccggccctggagcgtataacgccgaagatgccgaaagcgcgcttcgatacgactgggttgctcgagcccatacaagtgccgccttccacactagcaacaccgataggtttggccgtctaccgggaaaaattgtgacagacggagagctgggtaagggtgcacctgaagtatttatttggtattcgaagattcacacgattgctctgatgtgttgcagggccaggaacgtacgaggttcccacgctagttgacaaactttcagagaagcagggatctgccagcgtattcaagtcgaagacgtcgaggacggaaggggtatcagaagggaaatcaagaaagggcaatgtaccaggtccggcattctaccaccctaccagccctgacaagcggtcgcacttactcaatgcaaacaagaaatggctgtaaactaattacacgtaacttaccctacatttggtacagaagtatactttatctttgaatcgaagcttttcggcaagagatccttgacgttgaagccagcaagttgctctaaaagattatgtcgtgccacacgtggagcaacataagcccagcatttcatcattgcacccgagggaaagtggaaaacgaccatgaacccgtacgtagaggcacccgaaacgcagttcgacccggagacgtacatccacacgtcgactggcaacaagatcagccgcaagtgcacgctctgcggcgcccacaacatccacttgcgcggcaaggtccgtccatgtccgtcgcaagatttctggatttcggggttcccatgagttgaaatgtttttttattctagacgattattgactcgggagcaattgtacgcgctgacttggccaaagtgtcgctcgggaagcagtgcatcatccgggagaaatgcgtcgtcaagcccccaacgcgagtcgtgtcgacgtacgaggcggattgttagtactgtagccgtggacgaatgctcacttattcattgtttactaacatgtagtggactggccttcatccctgtgaagatgggagactacgtgtacattggggaggacacggtggtggaggctgcgatgatcgggtcctacgtgcagatcggcaagaactgcgtcattgtgcgtgcccgtgtctgcaatttgctgcctggacaagactgacgttgctgatgatgacgtttggtgcactgttattgtgtagggtaagcgcgctatcattcgagactgctgccggatcgaagacaatacggtcgtcccggcagacgcagtcattccgccgttctccagaatcggaggcatccctggtacgcattcagtttatttctttgatcgaaatgcagagtacagtcctgaccgtgttgactttgttcaggaaaacttatcgaggacatgccggaggctacgcaggagttgtgcattggacaagtcagccgatactttgacaactttacacctcgtgaaggctaagggcgagtgcttgctacgaaccgggttcctcgacttgagtacacgacagtaaacggcaggcatcttttcatgccatcgagacagcacagctagatattttctcaaccattgaaccattcattgcacgtttacgatggaatccattacgtcctaagaaaaaatattgataatgagcttgttacgggagttaataaagtaagagatgcatcaaagtatttgcaggtgtaagtgtagcgatagcagcacgcccccagtccgcggaccgactatggttggtgtttgctccgcttggacggcgacggggccgtgatgcgatcgtccgggtgcagtcggcgatcttcgtcctgtagctccaggatgcgtttgcccttgtagagccccttggcgacacagcccgaggacaaactggcgctgcggtgcagcgggctgtagcctaacggagtttgcctcgccgggtcgctggagtatccactatcacttcgtggagctggagggtacaggtcttcgctcaggctgcgcattctcagcactgccggcgggggcatggaggtgtcaatcgctgggacgtgccaggtctcggagaacttccgtttggctccacacgctgctgacctgggggtgggcggcagtccccgactgccaggcgacgacgacgacgacgttgtagtagctggccgcacactgttgcagtcgacgtcgtgtcgtctcggactaatgttgctggtgtgttgacgtagtcggtggtgcagtttctgcgtgggggtgcagggcttgacgccggccagcgccgcgccctcttggaacctgtgggagacgctgaccggcagcggccgcgcaatgggcagcagcgtcatgttcatctgcacgaagctccaggtcgagttgtcgctgcgcgcgggcggcgcgcccaccacgggctcgttggcgcagagctccatgaggttactgtcgccactgggtttggcggcggcggactccatggtgcggatgactgggggaggcatcggggggagaagagttagcgaggaattctacgaattgctccggattcggaagaaaaccgagtgagtgagagtgggtgggaggccgcacctacgaaagagtgccgagtgactgtgctgcggctttccaagctctgcgtggatatcaggtaaattgcactaacaggaaatgacgcagtcgccgagggtcatcgaaaggcggcgagtgggctgagctggcagtcgacttgcggggcggcgggcgcggcgcggactgactgcctgagtgagtgactcgggcgagctggagggggaggaagaagcccaagaggtcgcacgcagggaagcggcctctcctttttagaacgccgagcgaccaaacgattgctaaaaatggcgacgaattagaaatggcacttcaaccacagagggctatgcagtgctatctatcatggccctttgacaacttaagcctgcgctgctgcacagtcggagccatatatggacagtgcgccgtcgggccggccgttgagggcgtacgcgccttggacaggcttgcagcgtgggcgggcgacgctgtgatggggcggaagttttgcgaaggagttactatctaactcccgctgctctggcggcgaggcctcgggcggaacatgctgctcggtagcaggcggaaacgcactgcgaggcagttggcgacggcactatcggagcgttcaaacaacggtggcgcaggttgctcggaagcagcggttgtgcaagcgagcggcgttggatcgcaaagctcgtagttcgattgtccaagtctcggacgatagtgtggcattcgatacagccagccgatacacaggcgattctcatacgtacacgggcgcttttcttgttgcatagtggcgtgattcatgcagcgttggtgaaaggcaaccaaccagtcggctctaccttttcgatggtcttgcacgcctgcttcagttcagcgaggataagttgtcagcccctttaaatgcagacgggtcttagcgaggtgtgttatcaccagctctcgaagctgcaatggagccgccctcttcagacgcggtgcggcacttccacttccaatttacaacttccgaccgcagaggacgaagactcgatcggactctatgataatacatagagagagcggaaatcgcacctacacctccgtccgtcggctatcgttcagttgtcgcgcacgcatttgtacagtatgtatgtatccaacgagcaacacacccgcgtacgaaggcgtgctgcacttgtagctttgagcattgctgctcaaatgagctgtatctccgatttaggcgcacgtgggtgcacgtgggtgctaattcgaggtcttattcgtcacctcttcccgtcgttcggttgtacacaccagacgaacgacacaacacccaatccccctcatttccagatcggacttgaagctaccaaccagatcaagaccaaagacacacagactgatagcagagatcatggctgacgtggcggcgatcatcaacctcgtgaacaagttcgcgctctcgtactcgctggaggagggcgacaagtcggtcaagacgctgctggcgctcttcacggaggacgcgaccttcttcgaggagctcgtgggcggcaactgcacgggcacgagcgagatcgaggcggcgctgcaggagctcgtgagcctcaagttcctggccgacacgcgccacctgcccagcggccacgtggtcgagctctcggacgccgagcacgccacggtcacgtcgcacacgaccgtcttctggaagtgcacgcccgtcatggtcgtcacgtggtcggacgtcgtggtcaagcagggcggcgcctggaagttccagaagcgggcagccgacgccgtgcagaagaacctcgagatgattggcgagatgcagctgcgcggcaagaagcagtactcccacaaggacgaggcctaagcttaacgctgggctggcacttggtctgtggacctgatttcccccccccccccaactcgaactcgactcggcaagctccagaagagcgacacgtggcacaagagtggagctgcgtttgtgttgctcgtatgggagcattgattgccttgctgcacgactcaaaaagcatagaaaaagaactcgtggttctgccgtcgacgctgcaggaatgcagagatggctggagcatgagaataaataaattgccttgatacttttgggaggaagcgtctctttattttgccagcggtcgcggtgccttcaaactggccaagaagacatgggaggcgcggtgtctgagctgcgcggcgagatccacacccacgtgttgatcgtgcagcactatccaatgttcctggagccggtcctagctggtacggcatttttgttggttgcacgacgaatgtcgctccatttaacccctcgttgctgcctgctgtagcggtgcagtacttccttcatgctgctgagcttggtgaaggcaccaaccgcgagaatcctctcgaggagatctcgatggacgttgtcatcacagacaagcgcgtgtttgaagaggcttcgaccgaagtggagctgctgtcagagaacccagcggtgacagaggccttgctgcatgctgtgcgcaactatcggcaactggagctctcgcccgacatcgacaccttcaagcggtggtacgattctccatggcgcaaaaacaaaccctttccgaggtttgttgtcgtcccaccagacgaagtcccgcgcttcaggattgcagtgctccgaacgagcattcgctgtctgcgtctcatgatgttctgccaagacgggaagaagcagctcgaagaatctggcgggcctgcagtgctgaaccaggcagtactcgaaaatccgctggatgacttcgtgaaaaatgacgtcaaggccatcttctccgctgtttacggcggcgataacgcagtccgacgaatcgtgatcagcaatgtgcctatcgttgttgagatgatgaaggaaaaccacgagagtgccattgtgcagctcgcaggagtccgacggatctgttcactgctcgcagacgtccaggctcgccagtactcgccgtcccaatctccgacacgtacagcacagcaaacggctccaggagatcgacccggtgaccaggaaaataataagacgagtgatccagtagagctcgagcgtcttgcattgttcgcagagctggatacgtttgctgtcgtcacgctggtcacggaaacgctgaaccggttcgacgtcgacaagtacctgagcttgtacgtccacgtgtgtcgctttatctctttcgtagcgatcgaaggtaagcttctttcaagacaccttgcgtggatatcttcgctcactgtttcgttgtctgcgatcgtgtcatcttcagagcgaaacgcgaaacttgtcggtcaaactggaggcatcgaaggctccattcgcttgctgttcaaagctcgtgaaatgcagcgtcagaagaaggccgatgagaaagatgaagcagatcggctggcgaagcttcagaaattgccagagtctgccgagtggatgagccttctgatgcaatccaagaaagccccgccgccacctcccgtcgatgcgtcgggacaagccgtatccattgcctcgctagctgttgtagacttcacacccacggagattggacagcaggcactttgggcgcttgacttgctcgccactcttgacttcaacgtatccatgatgaagttgcatagactaaagtacttgctggaagagattcgattagaccccgatggaaaagagctcggcgcagtgttaatccttactcgaagattgaggctcatccgctgggaccaagttggcgcaccttcacctgagaaaccaaaacgcaaagcgaactcatagataatgttaacaattcagaaacagtgttaaattttcgttaacagggtgttgcacaccacagcacaggaggaacgaggttggcaagtctccggtctacgacgaaagcaccgacacagccgcaagtgcttctttatccgcggccgtcagctcgggcatgatggcctgaaggacactagcgttggccgtaatattttgcagcgcctgaggaatagctccctgtacatgaaacgaaccgagttacaagcctgatcaacaagctacgcaatatccaaatgcttaccttcaggtcaacctcgttgagagggtcgaagtacgcctcgaactcttcctcgggctcttcgccatcgttgactgcggtaccaccgtcggcatccaagcggtccgacagaagttcatagtcctctgcaagtacaaaacaatgtgttagtagagttttcaatccaaacaacccgcgcaaatcgtaaacactcacccgcaggggcgaacaccgaggacgtcgcgccagcaccggaaacaacctcgtcatcaccctcgccgtccgacgagtcatcgtccgatgattcccactcctcttcgtcctccgccaagttggacatcgtcttggcaagaatgacaacaaacttggtcaaaaagtgcaccgttgtgtactgggtcttgccgctcgcaggagtgcttcgggccttcgaccgcgtctggatgccattcgagccagaagcaccagcgttctccgagtccacagcacttccagtcacagtgatggcattgatccgagggtcattccactcgacaaccttcagcagagcactcatggtcaccttgatgcagtacagtccgtagaagtcctgctgcttctcgatccaagtgcggaacacaaaagtcagcatgttcggggcctgagcctggccagccgatgcaggcggaggaggaagttgctccaacacgttcagaatttccgggccatgcgagtgaacaagacgagcaaacaccatgcacagagactgcacgagcgacgggagctccgtcgccgcaagacgagcgcagacagcgctcaggattgattgcacggtggccgtaggcaggctaggacccaacttcagcaaaatctgggtaatcaaaccgccaacgcaggtagcgctcgcatcggacacggcaggcgacagcaacttagcggagaccgacagggtcgtgtcgataccgttgctgccagcagccgtggtgtatgccgccagcgggtcgaccgcaaacatcacaaaccacttcaagcattccgagccggcgttgagcaccttctcgtcttcgacagcaccaagcaccgtaacaagaggctcgaacgtctgctgaacaacctgagcaccgagctgctgggtcgctgggtccgcgccgccgctcgacaaggtgccacttgaagcgaaggagtgacgcagcaaagtcttcaaaatagtcagcgcgctgccagcggtgtagatgccatttccagcaccctccaggtccgacatactctggatgagcatcgagcgaacaacaggcaagacctgctcgtgaagcttggccgtaatcgcagcgttgtccagctgaagcagagcgccaaacgcaccgtcaatcaactcggaaatcagggggtcgttcaggttttggccccagtggtgcaagaagcacgccacaacacgctgggccgattcaagcgcaaggacttccgattcctggaggacgacgacgagcgtctcgagggcgatgtgaagcgtctcgtgcgtagactgctccgcaagactcgtcaggcggtcaatgataacggcgttggcttcctggagacgcgccttgcccgtatcgttgcgaatgatggcgccaatagcacggcaagcatacatgcgaacgggcaggacctggccctgctccagacccgaaatcgctacttgaaggaaggcatccagcatctcctggttcatacccttcgccaggcggctagcgcaccacagcgctctcgcgcgcaggtagatctcctggctacccgcgttcatcaccttgaacagcgtctgcaggaaagccgacagatccagcagctgggagatgtccgtggcattcttgctgatggcatcaagcgtcgacgtggccaggcatcccacgaccagcagagccgcttcctgcagacgccagttgttcgggttctcagccttgaggcgtcgctgggccgcatcaagcgcagccaccaccgccttgcgtcccagcacagcctccagctccgtgaggaggtctgtggccgcgttgcgcacgttgaacgcgaggctctcgtcgtcctcgtccgcgacgtacttgttggggtcctcctgccaggactccatctggctcaccgtgatctgcatgtacccgatcatgacgaagacaaagtcggctagaccgccgacaattagctggcgggtcttcttggtcggtgcctggatggcgccacgcacaaactcgaaggcagcgacgatcatggcgcttcggccaatgagcgcgccctctccgtcgctgtcgtagccctcctcctcctccgaggcgctcagcacgacctcgcgctcgtaggcctcggcgtcgttcaccatgaggccgtagacctggggcatgatctggggcatgaggtccgtcatctccttgggccactcgcgcacgaagctcgcgagcgtcgtcaggatctggatcttgatcgagtagtccttgacgctctgcgcgggcgcggtcagctgctccaggaagagtgcgatccactgggtcgtgttctcgtgcagcaactgcagcgccgtggcgttgcccacctgcgcctccatgcccaccatgagcaggctgctctgcacgatgcgcgcgatgcgcgagcgcgtgcccgccgggaactcggcggtcagcacgaacacgcgccgcaggtgcgggaacacagaggccacgagctcgcagcagttgtcgctcgagaagtggccgcccgcgagggacaggaagcgcacggcgaagtcgatgcgcagcttgtcctggcccgagatcatggccatgacggccggcaggatctcggcccactggtcgggccagtcgcgctcgaagatggccgtgaggatcaggcacagcgccgtctgcagcttgctgccggcgaagagctcgagccgctgctgcagcgccagcacgagcgcctgcttgacctgcgccttctcctgctcgggcaccacgtagggggctcccaccgcgctctcctcctcctcgctggccacccagtaggacgtcacgagcttcttgagcagcagcgccgacagctgccgctgcgcctcggacgcctccgccgagaagaggaactcgcccagctgcagcgcgaagccaggcgtgcgcagcagctccgtcagccgcgcttcgctctgcgcgcgcacgtccgtggcggccgacaggctgccctccagtagctgcaccagctccatcagttggcttggtcttgggcggtggtgtgtttgttgattcccgcgcgattttgagtgaggagtgatggtccggtgggtgaagccatgtgggcgatatagtgaaaccaagtcaaattatctaagggctcaccatgtgcttatgaaccaggatagctctgcgcaatgccttctaggtgtggtcggccatgcaaacgagaaaatgccttgaggaaactgtgagcccggttgaatgcatcccgggctacgtgtagaccggccattttgaatggaaaagagtttgcccctctgcggagcgcaggtcaggccgcagatcccaagttacaggagattgagcttcaaagaagctgataccattcaactgcccaagacgatgccaaaaagttaccatcatggtgccttgtggaaatttcccgcttgaacaaactattacattttgtttgcacttgcagcgaccaagttgtcttagaagcaccaaaattaagagcgaccctcggatatctgtcgatgggctgtattgggctcaaccgattccttctcgaaagaaggattaaagataggcaattgaatgaaccgtatcgtggatgacacattctttcttgtagatgttaaaggtgacatcaaacttacgatgcgcgcagagaaaaatcttcagcaagctcgtcgatagctttggttactgctggattcttaccgcgctccactttcccagataatccaagaaatcgcttgatcttcgttggcttctccaatgcgtcctcgggtagcgccaagatcttcttactaaaagccaagtactcaatgaagtcatgaagcggatatatcatcgcggcaatgacaggcttgacgtcaggcagcgcgtagactcttgatttgtcgagaggtccctcccacgcaagaagacatcgaaatgcaatttgctcgaatggcactagctcctcggtgcccgtaaatttcatcgggaggttgacgcgcttaccttccaccagccattctcgaagcagatcttgatatgtgcaaagttctcgaaggagactccgccgctccatttggttcattccaggctccttggcatccagaaatgactggtatttttcgtgacgttccaaaagttccatcaatgtatgtgggtggcctgacgacctccgatataaaagcattgctgcttgtgtcaatttctcctgggattccagtctccatcgatctttcagcgtctgctcccctgcttggatcactgtgatctgttcagactgaagaagacgcagatccagaagtgacccgatggcaacaacttctcgtccacctcactcgaggggctgtagacatatcgcaggaacgaagcagatccctccaccacgaaatataggccttgtacgtgaagccacggaagcaatacgttgcggcaaaacttaatgaaacagtcccgcgatttcatgtcatcatctggggaattgaaccactcgccgatttccctgatgacgatgtacaggggtccgaacatgctgacaaggctcttcacgaatgaaagggccgagtcagggaatgacgccgatagtagactccactcacttccgcagtcgagcttctgccagtgcgccattgacaatctcttcactaacagtcccatcgtctacccttcgtttgggcgagcgtaagaacactgtgtggcactgacacaactctgcccggaatccttctcggagcctttcgtcggaccacttctgtcggcactggttgatatagttctcgacaaacgctgtcttcccgagaccggacgcattatcgaccagcgggatactccacgtataaggattcccccactcgcgagagcctgagaagcatgtgaggtgggcacgatacagggtcttgaaagcttcttcttggtctgcaaagaataatctgattgctcagagcgtactccagctctgctgcagggagccacgggtcggtaaccaccgggatgttcccgcttcgaacttgctcttgtcatgtgcggtcggaggggtcaaaggtgctgtagagcttgagtctggaaagaaggaacttgaagttaaacacagtcgcgatggcagctttcagatcggcgcctgtggcaccctccctggtggttgcaaacttcacgctgccgtcatcgaccaccaggcacgctacccacaactcatcgggtagagggggtgctggcaatgccagtgacatcggttcttctcgtttccgggacaattgaagtctgatgcctcttctgggccacatttgtagattgaagtaaagtgttcttggcgagtcgcaacctatcgtcaagagatagtcaacccgatatattatacgatacaagtttcgcttagatcgggagacacttggtttcccagatgcggttgcccacgtactgtaatcggtaggatgtgtagcgtagcgagatgccctggaagaggaaggccaggtagcagtccttttctagcatttcggcaaagcttttgcggtccaagacgtacaccacgctgcgctttgtcgcgatgagagatgttttccgtttctcacccgtcagaaagcacatctcacccacgactgagccaacagagacttcttcagttgtaccagcctcttcctcgaccacggcggtgagagctccatcgacaagcagcagcgcgcggtcaggggtgtcaccttgtctccacacgacttcgtccttttcaatttcttggatgtggaagtagtccaggagacgctgctgcactgcaagaggttgatccggcataaatcgtcgcaggttacgcaagtgcgtgaactcgtcctcgtcagcggcgcaagtgctcgcaggagacccgctcttggcagaaacgttcttgcccaggatgtcgttctcgcaccattcaagcgcgccatccagatccgacgcgatgtggagcatgcggttgtcgccgaagagctcgatcaagtgctccgtgaacttcacgtatgcagggggtacagcggcgaacacaatcttgcaactatgcgcatcgcacgcgtacttgatcttggtcaatcggtctgcagcggaggaatccaatcccacaaccagcgtgaagtcgagcacaagccagcggatatccggtcgcggacggacgtcttcactcagcacgctttcaagcggcgactcgattcggctactcgtgcaatccgcgccctcctcaaagagctcacgcacgtaatcgctgagctggttgatgttgccgaagaataggtggcccttcaactgcaccacgtggatgttgcggcactcgcggtccagcacatcgagttcatcagtcgtgcgccaagcatgactgcgaagagtggcggcactcatgctgccacggatcggagcgttcgtcggtgtgcgagcactctgcatcacgaaagtcatgcaggccagcaacgctccgacggccaggccctggttcatgccccagaacgtcatcgttccagcgatagcccacaccgtgccaagctccaaggcatccaactggtcgtacgtgtcaatgagtgcttcacgaagcaagtcccagccaaggtgcatcatcacgcagcctgccatgcaacgcgggatgtaggacacagcgttgggcccaacaaagaagaagaaccccatgatgaatccgattacgaagccactgcgacgaccgccgcctccacatttgtaataaagcgccgatgtagagtagcacaggtagttttgcacagttccacagactccgctaagggtgttggagataccatgtgcaacgagctcgtcgttgatatccacctccttgtccgtagtgagactgagcgacgggatgttaatcggcacgtgcatgagcgagaagaacgtgaggccaacgatcgtgccgaactgcttggggataacgtgccaggccacgagtgagaagtcatactgttcccacagcgagtagaaggcgacgtccggtgcgcggttgaagaaccagccatgctcacgcgcagtgtccgccgagataccgagcagcagtagcaccacgtaaaacagcggtggaatcgacacgaagaagagcggaggaaacagcggcgacttgatgtggcgcgcaagcacccacagcgtgagcgccagcaaggcggagctgacccagagccacacgatctcctcatcgaagagtcccttgacgccgccccacgaccagtcaaaggcatggcccgtagcgttctcaatgccgctctgcagcacgaacgcgccaataccaccaacagcgccgacgataatgtgcttggggaagaggtacacgatgttgccgagcttccagtgtcccaacacgtagaacagcgcgccgcacaccaccgacgagagcgcgtaggtcaccaggatcgtgggcagcacgctcgggttcttggggcccaattcttggataatcgcgatggaaatggtgtgcatgaacggcacgttctccaccatcatctgacagatcgcgccgtcgaagttgctgagccacacgaacgtgaactggcagatcgtggacgacagtaggaacatctgaatgcccagcgcgtgcggcacggggatgtcgttccactcgacggggaagaaggacagcccgaacgggacgcagatcatgaggttcaccagcacggcgatggctacacagggcgcggcctgcagcgcgtccgtcacgccgcgctcccagccgttgagcgggtcgctggtgtccctgtgcgagccccacgactccatggacacgcgcgtggccccgtacggcgagtagcagcgcggggacgcggcgtgaggatccgtgaccggcagcgcgtcgtggtgcgcgggcgactgcgtcgtcggctgctgcgtgaagtgcagcgagttgccgcccgcgtcgcgacgcagcggcggcggctcgaacaccatgtgagacgagggcgcgtgcgtgtgcgtgggggtgggagcgggcgcgccgcggcgcggggagcgcaggcgatgcggggacagcagcagctgccgctcgtcgtcgttcagcggctccatggcggaggcccagggctcgaggctcgacgcgcttggcttgcttgagctccagacgtcgacttggcgagtgagcaggacaaggcaggtgtgtccgagccattttcagcgaataagagcgtgttctggacgatttagcggccaatcgagtggcggcgaggatagcggagaccgcggctatgtttagcgaacggtttggatgttgatgcccatcaccatttcatacctccgttgcaggcacttgcgccgagtacatgtatgcagcgttcccgccgatggacgttcggcgacgctcgagaatgcaaacgaggagagtcatccctccccactggtgcggctgctgtctactggagttggctgcagcagaacgaatggagggaggccaaggtgtggcagctcgagcgctcgagtacgtgcgacttggaaaacgttctgaagtttggatgtcaagcgcgctcgcagttttgagaagttcgtccacgaaggtccactgtgataaacaagcgtcgtatttaaaattacgtgatcaaaggaatgggacagcaaatgcgtcttgcgaggaagtaccggtaagtgttgggctgggcgaaatctgcagcggctgccagtgtgcaatgcatgatggcgagatttccgagtgtcgtacatgttgccgccggcacgccgtcagccaattgcctcagcggtcggcgccaacgtggactctacgtggagggacattttgccggcagcgccagaaacgaagctcgcaccgtaaaaaaacgcgtcgacaacggatttggtggtggggacctccgctcgtccacagacagccggttgtcacgtcacatttgcgtctgtagacgtaaaagatcccaggcatgctcccggctgcctttgcgggcaagtgctcgctgcgggggccctcggcttcactggtacacactcgtccacgtaatcgctggcgggtattcgtcggcttggtgtgctgggcgacggtatccagggccgacaaggttggctggtgccggcttcatcctgttgccggcccttgaagatacgttttgctacatagttgccaccactcgtctacgttgaccacgctgcagcccaaggcaacaacatcgcacaaacgcgaaacagccctgcaagtacgtgtaccggtatagaaaaggataaaagaaacaaggaatgaaacgactcgaaaaatgaaagtagcaagcttgcatttgacgcacaactcatcatctatctctgcggcttgttctacctccaacctgcaaatgcatacgggcagtcactcactatgaacagaccgacctgatagggtccaacctgccggcgctatgtgtcgccgtgttgcagtcacacaactccttgcggagccatttagagcttaccagtgcccgaggcgttctggatgacagcgcggatggccttcatctcagcctcaaggcgcacgaggcggtccatggcctgctccagtgtcatgctgcgctccacgaacgagccgccaaccgcacggccggcaacgaacgagccgcgcatgaacgagtcgttgttgagcagagtcgagcccatgcggatgcggttctggcgctgagcctcctgcttgacgtacttcttgctgctgaccttgcgctcgaatacgttcatgtggtcgatgtgctccagcaggaagacgagcagcaccttgcccaggtcctggatgaagaaccacgcgaggcagtagatccagacgaacacggcgaggttgaacgagatggcctccatctccgtgaacggccagaagacagccaggagcgtggacacaaccgtggcgaagcaagcagccaccgcaagaagacggccaggggcgcgcgtgaagaacagaccctcggtacgagccgtgaacaccgtcatgaagtccgacagcgagatcttcaggtacatcatcatcatcacctggtcgtacggcaggtcgcccaggccgaagtaggcgagcacaccgttcttgttccacgagtcgagaccccagaagagcagcagcagcgagctggcaacggcaatcaggccgagcgtcgtcgccacccagtagatgcgcggcaggttccaggtctccgggcgcttggagggcaccacgttgtcgtaggcgatcgagatgatcgtgccgtcgttcaggatcgtgatcagcaccagagcgatgaccggaagcttgaagtacgggtccacggcctccgtgctctcattgctgttgtacgggcagtcgccgacgtgggggatgaagtgctggaagcggcagctgtccgggtggaacagcagcaccgagatgaagaaaaacatgagcagctgaatcgtgcaggcaatgcggtacgtcacgtagttgcgcatgcgctggaagatcttgcgcgacagcgtgatggcgttgataatgacggacagaccgggctgcgtgagcacaatgtcagcggcagcgcgggcagcgtcagtggacccctcgacggcaatgccgacgtcggccttcttgagcgcaggtgcgtcgttcacaccgtcgccggtcataccgcacacccatccgcgctgacgcagcacctcgacgatcaggaacttgtgctccgggaacacctgagcgaaaccatcagcgctctccacgatggcaccgtagtccgagcccagagtcgacgaaagaccgtcctgcacgttggccgtaggaagcacgtccgtgcccagaatggtcgtgcccattccgagcatgcggcaggtctccacagcgatagcggcctggtcaccggtgatcatcttgacgccaataccgttctcgtgggccagctcaatcgtgcgcttcgtgtcgtgacgcggggggtccaggaacgtcatgatgcccaggaacacccagccgccatcggcctcctcggaagtgcgagccacagccagcgagcggatgccgcgcttggccaggtcgagcaccttggcctccacatcctcctggatctccgtgacgttgtgggccagtgccaggatgatttgcggggcacccttagtcaccttgaacacgttgccgtccggaccgcggatcgtcgactccgtgcgcttcaccgaggggtcaaacggcatgtggtccatcatcgtgtactggtcgagcgggcgcaagtcgatggcgttcagcacgagcgtgtccagagcgtccttaggcggctccttccacttggcggcgagcgcagcggtaaccagcacctcctcgcgggtggccgtcgggtggaagataggcaggtcgtcctgcagttccatcttgttgcgcgtgagcgtgccggtcttgtccgagcacagcatgttcatgcccgagagcgtctcgatggactgcagctgggtgacgatgaccttctcctcggcgagcttgcgggagccgagggccatggtggacgtgcacaccacctgcatggcgatggggatggaggccacgagcagcacgacgcagaaggcgatggcctcgaggaagtcctcgccgttgtagatgaggtagccgaggcagaagcccacgagcacgaacgagatggccatgaggaacatggtaatgcggatgaggatcttctggaagtggctcacctcgtccacggacgaaatgaggctggccgtcttgccgaagaaggtctggccgccggtggccgacaccacggcctccacctcgccgcgcacgaccgtggagcccatcttggcgttgtcgcccgtggccatagtcaccgggaaggactcgccggtgagcgcggcctggtcgatctgcacggggttgccctcgcacaggtcgcagtccgcgggcacggccgagccggccgacagcgtgacgcggtcgcccggcacgagcagcgcggcgttgatggtctggtgcacgccgtcgcggatgacctgggcctcgggcttgaggctggccttgagcgcggccacggcgttgccggccttgagctcctcgtaccagcccacgacgccgttgagcagctgcaggaagagcagcacgaagaagtcgggccagtccttggtgatggcctccacgaggatggccagccagatcatgatgggcatagggccccagaactgctcggccagcttgacccacgggctcttctccttggtcgagagctcgttcgggccgaagatcttgaggcggcgcgaggcctccacggtgctcaggccggcctcgcccgtgtccagcagcgagcgcttgtccacgcccatgtagaaccggtcgtcgttgctcacgccgctgtacgagtgctcgtcgccgttggcgagcagcgggctgtgctccgacatgctgctcgctccttggggttcgtctgggtctggtagtgtaagggggatccggcgaatcgagaagtgagactggggatccgctcgagccgagccgagccgagctgaagtacgcaggcgggctctctccctctgagccaaaagatccgctttcgagctggccaatcacacgcgcgtcccatctccagcgccgctttttaacagtttttgtgacgatcagcaactgaccgcgaggtgtccgcacagcggtcgatggtcctgccggtgcaggctcgggcccagctgggccagaggcaccggcagctctctctgttaatttaaccccgcggcacgagacgccaacaaaggcagccggagaataatttacttagcgggttcctcgccccagctggcgccaagtttgagtttgatccacgtacggttaattttgccgccgccgggtatcgcagattccgtgcgtggggcggaccggggccgggcacagcaaaggatgtggcaacgaatgagcttttcccgtggacagcctcgccacggacagctccgcacttgaagccagcacgaccgaggtgtccgcacattggcgagctcctgtgctggggccggcaaattattcgcctctgcgaagccggcggccaagacgccattcgtttgcgtgcatgaaggcgtcagcgtccactcgctgaacgtaaatgttaactgctcttgccactagattggccataccgcccgtggagggaatgatgcggctcgtcacggcccctgcgcgcgaatcaacgagtcccggtggtgtgttcgtggtttgggcttgccgcagtgtaccgcagtttcattgtgcagagtggttcctgtcttcctcgattgaacactttccagcacttgcttgctgtaaatttgggtgtgagctggaaccgtacgattcctccgccaaattgcttgctacacacagcaagcgatgctaaactcaccagtactcacggtcaagcagcagtaggcacggacaaatggcacgccacgccaacgccaagcaccacttgtctgccacgttcgacgcggcagagcgcattcacatgccagcaactcacaacccgctgttagtcacacatccattacttaactcgatttctgaagcaagtacaaacacttggcatgcattcgaatcatactcctgcttgcagtcaccttccggtgttgccagccttctgctctacgcaagctcaaaagccaggcaagagcttcttaagcggacagggcttgtacgccggtggagtgatgtagccctccttgcccttcgcggggtcccagtacaactcgtaggccagctcgtcgttcagcggccagtcgttccggaaccgctcgaccaggtcggggttcgacatgaacccacgcacgaagcttaccaggtcggccgcgccgctgtggattaccccctcggcagtgtcccgcgtgtagctgcaattggccatcactatccccttgaagtggatcttcgcgtcgagcgcagtcatcacgcggctcttgtccgagtagccaaagccaaagccgtccaggatcgccaagtaccccaggccatgctccgacaagcgctggaacacgtacgtgaacagctccgcgttgtcagcgctgcccatgctgccatacttgctggagggagacgctcgcacaccgatgcggttggccgggtacaccgtcttcaccgcctccacgatttcgttgagtaggcggtagcggttctcgaacgagccgccgtactcgtcggtgcgctggttcgtgcacgattgaaggaactggtcgatcaagtaaccgcttccagcgtgcacctcggctccgtcgaagcccactttcttggccaactcggcgcactgtcggtactgctccaccacatgcgggatctcgtcgagcgccagcgctcgagctctctcgaagcatgtgcgttcaccgtcagcgttgcgagtgttgccaccttcgagcactgtagcagaagctgaaaccacctcattgtcagcgtggaacgaagggtgcgactgtcgccccatgtgccaaagctgcacgaagatcttgcctcccttctggtggacgcggtcaacgatctctttccaccccgcggcctgctcggcggtgtagagtcccggtgatccgtaccatccgaagccttgctcggagatggcgcagccctccgagatgacgaggccagctccagctcgctgctcgtagtagatggcgctcatttcaccaggggcgtggctcacagggttgatgcgggctcgagtggcggggccaaacacgacgcggttcttgagcacgagatcgtcgcccatctgaagcggcgtgaagagtttgtagttttcggtatgagccatggtaccggggagcgatgagttgcttgggatattgtagctaggaagggaattccaatgtgagaacttagaggcgagcctccagcacaaaaggttatgctcgtcgatccaagcgcaaccatgatgatggcaacctatttcagtacattttttgcgtaatcagcttacgtaaaagtgatacaaacaaaactgtactgaaataagtttccacaggcggatggctacacttgcaccctgctgacgcaatcggctagtttagaaagacttcgtctgctgttctcgttggcgacgccacgcctcggcgagttgcgtttaacagtagcagtgacagccattgaagtgccttgcctcgacatcgtcatggtcgtgaatctgacgcaaacgtcttgtatacgtcattttcttggcaatctcggcattcttctgggctgcgagaattggcctcattatcgtcggtgcgaggcaatcactttgcaattaaccagtaaccgagcattcttcacttccaaaccaagaccatggtcgccaatactgctgactacgcgctcttcacgccgctgcgtctgggtgaagggcttgagctcaagaatcggatcgtgtacggccccgttacccgcgctcgctgcgacatcaaaacccacgcacctctggagcgcaacgctgcctactacgagcagcgcgccggggctggactcattgtcaccgaagcctgtgccatctccgaacaagctttcggatggtacggatcgccagcgctctacacggacgagcaagttcaggggtggaaagaggtggtcaaccgagtgcacaagaaaggaggcaagatcttcgtccagctttggcacatggggcgccagtcacacccctctttccacacgaacaatgaggtagtctcgtcctccgccacgttgtacgagagcggtaggacccgaaacgcgaatggagagcacgtgggatatgagcgagcccgtgcgctggcactcaacgagattcccgatgtggtggaccagtggcgccagtgcgctcagcgagccaaggaggcaggcttcgatggcatcgaggtacatgccgctgggggctatctgatcgaccagttcctccaatcctgcacgaacctgcgcaccgacatgtacggcggctcgttcgagaaccgctaccgattcttgaacgacgtcatcgaggcggtgaaggcggtctatccggccgaccgtatcggtgtgcgcacagctccgaacagtccgtacggtggtatgggcagctccgacaacgtcgagatgttcacgtacgtgtacaaacgtctttcagagcacggctttgcgtatttggccatcctcgacggttcagagggtattggcgccgatgcccactaccacggaaaatgccgcccactcaccaccttcgacgccaagacagccttcaagggcattgtcatcgccaacaagggttactcgagagacatcgcggaaggcgtcctgcgaagtggatcggccgaccttgtgggctttgctcgcatgttcatggcgaaccccgaccttgtcgagcgcttcaagaacgactggccactcaccccgctaatggactacgagttcttctgggacccagccaagggtgacgagggctacaacacgctcgataatttcaagccataggtgcgtatgcgctagagctcggtatcgatcactaacacaagcagcagtacgtaagaagaccaacatcgtggagaaacatagttcctttaatcgttttctacttgagcgagtgctagctggatattgagtcgcccgaagccaaaaatgttattcgggtgcgtagagctcgagatgtttccacaagatgcgtgcagtgcagcgttgctttcgagatcttcatcccttgtcgctgtagtcgctagtgcagtccaaactttctcgtaagttagctcgggtttcgcgctgagtaacaatgcggctgcccctgtgacgtgaggtgaagccacactcgttcctgaggtgattgtgtagacattgtctcgagtccaccaagcggaataaatcctcacccctggcgctacgatatcgggtttgatacgtccatcgacagaaggacccgtggagctctcggggagtagcatgtcattatagttggtcgcacctacgccaatgacatttgccatatccccgggtgagaccaccgtcccgcaagttttcgacgagcctgagttgccgatcgagaaaactggaataatcccggcagcttgccacgctgcgataaccgcggtaagtgttgcagtactgccacgaatgacgccccaactattgttcacaacgtgtggcgctttactacagtccgctttccctcccttcgaatccgtggggcatagcacgaattgggcgcaagctaacaagctcgattcgaggcaagttgatgcgctcctgcatcctcgacaagcgatccattttgctccgggggctactccgatgccttctgccccagctatcaaccccattacgtgagtcccgtggcccgacgaatcgtaaggcaccgcacttttactttccgggtcgaaccagccgtagtcgcctcgataattctctcgcaacgcctcgtgtgagacgcggacaccagtgtcgatcgttgccaccgtcacgttcactcccacaaacccctttgcccagacagcctttgcgccaatcttcccgacactccacgtgaggacgttcgcgtccgccacagcgtccacaccggatatcacgtccgcacgctcaacgttgaagttgcccattgtcaggatctgctcctcgcgaatttctgcgatcgacgaaccgtgctccagctccagcgtgcgcaccagctcgatcgatgcattgacgatgagcaattgattggagatccaaaacgtcgtaatcgccgtcgcgctcttcgtcctttcgccgagaagctccagtagcggacgctgtgcggtcgctgcggatgtcttgagagaaaccacaagctgggagattcgtgcacctcgcgacgttgaagtggaacttgaccctaagcccgagagagcgccgagtgccgtcgttgtcccgccacgcattgtcaccatcaagttgatcgtcgatttctcctggagagcacggtagactgtcgagtgtacgggcgaggctgtagcgacattcaccgttgtgccgaaggcgatgaaccagcacagagctcccaaggaggttaccgtaattcgggagccgcagcctccgagggccatagtggtgctcgaagcgctaattcagcaatgcgctgtcctacgtgggcatccacctgaccacaggctcgacattgaccatcggtgggcacgaaagctttcatcgtcgagcggcgtttgggttatcagatcaacgcacgtcctttcgatccatttcatatccgagatatcctgattaccatttgcagctccacatgcgaccgcttcgctgggttgtcgtcctaggtcttctgctccaggtaattctacgtgcaagggcctgctatggggtgggcgcagtacgcagtactcactcgcatccctgtgctcgtgcgtacctgtagctttcaagagcggaatctcaaggcgctaacagcgaagttaccgatgatgtggacgacttcgttggtgacgaaggctctggcgccgaggtggaggatatccttgggaaggaagccgtagtcgagaccgatgctgtacaggaagaagcaacccagcgaccgagtgaggatttcgacgagggtgaagcagccgagacacctgagtggcttgacgcagagctgcaatggcgggtgcgtgttgaactattgagcttatcttgtacttgtacactaacgctagcacaaagcgtgacatggaggagttagagaagcgagagcgtgaagaggcgatgcgcgacgtcgaccaagttacggacgataacgaacatcaaaactacctcgacgagcagtacagacaggttcgtcagcaaacagattctcctacgctgcagttttgctcctctgtgactgtgtaacgatggtaaactctctgatctttcagaggcaccccgtggacgaagacgaggacgatacttacgacgagtacctcgaaaaccaacggagactggtgcgtaaaacatgattgttgcttatgtgaacatcagtgaaacacacacacacatattactttctttggagtaggaagatcagggcagtgaccagtcagccgacggcaacgaggaggaggaggaagccgtcccaatcgttcctggcctcaccgatgttgagctgttcgcgttcaacgcggagtttgcgaacgaagaggtactggacaagatcatcgactggtcttacgaccaggtcgctggcatgtcgcggtttcgtgacaactacatccatgtcgaagacctttacatgtacgtggctcgtcctcgctgcttgacgatcatcggattcagcgttcttcgtttaacgtttgtgttggctctacagattcttgctcaagaccctgaacccgctggacgaacccattgacgaggaggacgaaaaaatcctggaagacgccgtcgcggagctgcggaggcagcagggcttggtggacgaggaacaggtcgtgtaccggggcttcatcgcgcgcgggatgccgcttcgcttcctgcagtcgctggcccacgacatacaccaaaccgtgcagaagaggcgcctgcagacccgcgaggagctctgactttaaacacggaagttgacaccgggtcaagtccatggtcaggtacgttaagtcaatgccacttcagctttaaagcaatcattcatcatcgttctcgaaatgactgcaccacctttgtttaatggcctcgctacgtggaccaccggaacttactgtgatctttgtcgggttgaggccattaatcccgctacagttgccttggtatacagacctcatccaacaccgtccggaatcttccaatcaccgtgtttgcaacgcgattggctctgcgcgcgtggcctcgctctgattggtagaatacatgccgtcggcacaggctcgggcaaccgcaagcagcgggcaggtccactcgccaaagttgcccgcaaaggatagatagacacaggagagatggaggtcaaggcggaggacacgctcaagaaggcggcggcggcgtcctcgggcgcgctgctcacgtcgctgttcgtgacgccgctggacgtggccaaggtgcgcatccagtcgcagatccactcgccccccgtggccgccgtgacccactcgagcatcgccacgtccgtggccacggccgccgagcagtgccgctgccgcagtcgctgcgcgtgcagccgctgcctcacgcgccccgtggagaagctgcaggcctcgaggcgcgggctgccggccatgcgcatgtcgtgctcgcgggccgtggcgccgctgcagctgcagggcacgtcgcacgcgctgcgccacatcttccagacggaggggctcaagggcctgttcgcgggcctgtcccccgccatggtcatcgcggtgccatccactgtgctctactacatgtcgtacgacctgctgctgcacgagggccgccagaggctcccgcacatggagggagtggtgccgctgatggccggcaccacggcgcggatcgtcgcggcgtccattacgtcgcccattgagctcatcaggacccggatgcagggcgacaaggcgggggccagtattgcggccacgttccagcaggctgtgcgccgcggaggatacgcgtcgctgttgaatggacttggagccacgttggctcgggacgtcccgttctccgcgatctactggacgtcctacgagaacctgcagcgacggatgagctcggtggaagatctgacgaggacacagagggcgttcgcgtgtggagcggtctcgggggccattgcggccacgatcacgacccccttcgatgtggtgaagacgctgcagcaggtgtccatgacggcgcagggatcgcagccatccggcatggtggtgctcagacaggtggtcgctagcaagggcgtgggcggagccttcacgggtctcagtgcgcgcctcgcgcgcgtggcgccgtcctgcgccatcatgatctcgtgctacgagctcgggaaggaaaagctcggcatcgcatgagacgctgacaaaggtcactcatcacagccggaagtcgagctgggcagagcagagcgcggctgaatgggcgagatgagtgaccgtgtgtggtcaatgtgaatggaaacgtaggtccgatatttaaactaatatacaagctgcgggcctgctttgatcctgggaatcgttcatgttgaagtgggtggtgtgtttttattgcttttggtatctttgaagtgattgcaggagcaagtgacggtaggccggggcagccatgatgtagcgagtaatggaaagttgctacctataggattgacctgagtgatatgtacagctagatctcatgtcttcgatacgtgaataccaaaacacttttcttttcgctggaagaacccaagcatggtgcagcaagcgctcgcgtgcgtgttgctgcggaagaaccagaggccgttcatggtcgtcgccgacagcaaccaagtcgtgatgatggcaacgcaagctatcctcgagctgcgccccgacatcttatgtctcccaggagaccccggcgtgaagttttatccagccaaggtcggcgagaaatggctaagcgctgatgacccgcttctggaaaaactgaaggtgtacacaacttctgaagagatcgagagcctggtgggcaaggagattgactcaacgggtttggtcggtgccgtctttgagggggccgccacgcacggccagctatatgtgctcgtggctgttgccgatggtgcccttggagtgacaccggagacttcgacgtcggcaagaccctcgattcagtgttacgacaatggccggacatcttcttggagagacgacttcctgaagacagcgctatctgcagagtctttgccgcatgcttcagagctggaagggttgttcaagcagcctctccccgagaagattcgtgtggatatggcgttgcgtgaacaatggctccggactggtgaagtctctccagatctgatcgacaagatcttcgtcacaagcgcaaacccgtgtgtgaacttcttagctgacgtcgtgcgccgcatcacgaacccggtggctgtgtctggctcaacagtccgcgcattcgcccaattctggaacgatatggcttccagaacgccaagcagcatctgacgcaagtgtacaaaatgctggtcgagaacgacgttcctcatgtggatcggctcgtcgacacgtacgaatctaacggactcgttttgcagccacgaggtcgcgaggtaaggccgaccaacttgacggagctatttcgcgccttgcgcaatgtgctggaggctctggtggctctgcactccgcatcgtcgatgcaccgagacatccgctggcccaacgtgctgaagcgctgtgatggctccgagacgtggttcgtgatcgacttcatggatgccgcaccgagccacaagatgcaaacagtggcgagcacctcagcccagacgagcacgcccccgaaatcttcagccccggcgcagatcatacaacggctgtggatatttggtcggttgggcactggatcaaaacgagcggagtgacgtggttcgatttaccggagaaactagcgttccaggatgaactcatgcacgccgaccctgcaaggcgcccaagtgctgaggttgctctgaagcggctcacggagctggaggaaaaggagctgaaacgagagaccgaccaccttttgatccgacagaaacgaagcgatcaggaggagaagatcgatatggcgtcgaggaagcctccacgagcgggttagcccatgggctgcagagatccataaactgtggacctgctttgatcctggaaattgttcacgttgaagtaacagactctgtattgctattggtatcttgaattggtatcttgaaggagcgagtgctgaggtgatcccagttcaggccttcgagaacttggtcagcgcctggcggtacttgatgagagactcccgatgcttatcaagcgccttgttttgcttgtcgtgggccatgctgggttgcctgatcatgagtcgctcgaaaaccgcgcaatgcttgtcgagcgtcttgcgatacctgtcgagggctttgtggtggtcatcgagagattcacgatacttgtttagcacctcgctttgactgttctgggccgcgttggtctgccgtagcaccagcgtgtcgagagccctgcgatgcctattgagcgccttgcgatgagcctctagggccgcgtgggctcgtgcctcctctgtcagcattttgcttgaaattgcatttactactcttcagatgatgaattacccatttcaactcgatgacgctaccgttcgcgtccgaattcgcggtgcaggtggaaacttccccgttgctatcgaccaacttgcctggcatcctgccaacttccttccttgactgctcgaaatcgaaagtgaaactggccaagacgaagcttcgagtgttgtgaacgttcaacttcactcacagagtaacccatgggttatggggtacacatatcaacgtaccccatgtggttccactaaccgcatggctttgacgccggacactttctggttgaaaatcgcccagatcgagaaacgcaaccaagtccccacactcaggagcagctctgataaccatcaagacgacgatgctggcccaggcagctcgacgcggcgcgcagttcggcgccgcaacccacagcttcgcggccactgtacgtcgcccctccccgctcactggcattggaattgtcggaattgcaccgagttccaatgttctagaagtcgcaccacccgaatggcggatcctctgactgaccgtggcgtgttcgtggtgcagagaggcttcgggctggctggcagccgctaccagacgatggtgaagcccgcgatggccgctccgaccaagtcgacgtcgctgtggtcgcgtctcggcctgcaggcggccaagccgaccaagcagccgctcgtctactccacgaaagctcgggttcgtgtgtttctgcgttgttgcaatgcctttggtgttgctatacaggctgcgattgtagtgtagtgcaatgtgcaaagctgacagtgtgcggtgtgcaatttttgcagaagttcgcggcgtcgacggcgacgatcgagaacgtggcggccaaccgccccattgcgtactggatcttcggcacggcggctatggttggcggcatgattgctgtcggtggagctacgcgtctgacgaggtcggggctgtccatggtgcagtggaagccgcagggcagtctgccgcccatgaccccggaggagtgggaggcccaattcgagatctacaagcagttcccggagtatcagcagcgcaagaacatggtacgatggcgttgcaacgattgtataaagggtgatgggttattgacgaggtgggtcgctgtgtagacggtggaggacttcaagggcattttctggtgggagtacggccaccgcatgctgggccgcacggtcgggatggtgtacacgctgccgttgatctattttatgctgcgtaagcgtctgcctgtggagctgcacaagcgattcgctgtgctcttcggtctgggtgcggcgcagggaggtgtcggctggtggatggtgcgcagtggtctcgaggagcacggcaaggagcagctcgagaagcgcaacgaagtgcgcgtgagcccctaccgtctcgccacacacgtaagtatataaactgcatagagattatggatgaatgctggcgttgtactgactgacccgctcgttcactgctatcgacagcttggattcgccttcacgacgctgggcgttcttctgtggactggtttcaacctggtggcgcctccttcgcgtgctgcgatggcgcgtgagatgatttcgccggacgttctgaagcagactcggttcatccgcaagatcctgggccacgtttccaccgctctgggttacacgatcctctcgggcgcgttcgtggcgggcatcgatgccggcatggcctacaacacgttccccaagatggacggccagtggatcccggacgacctgttcgtgctcgagcccaagtacaagaacttcttcgagaacgtgccgctcgtgcagttggaccaccgcgtgctcgcgctgagcacgctgacgggtttcggcggcgtgtacgccatggcccgccgcccgcacatctggagccagctgccgcagcagtcgcgcaacgcgctcaacatggcgctggctgcggccagcggccaggtggcgctgggcatcacgacgctcctcacctgtgtgccgatcccgctggccgtgtcgcaccagtgcggtgccatcgtgctcatgacggccacgctctggtcgcagcacacgctcaacttcgccaagccgctcaagaaggccgccacggccgccatcaaggccgcgcccaagacgctgtaagaagaagaacacttcagcaagcgtccacctcaaaagcatgagatggacacacggtacgtaacgtagcgtccaccttgaagacaagcgagtgagtcgccaaacgcgctctagaatacacaaaaacctaccccaaaaaatacaaaacccacaaaaataaacaccaccgcgcgtgtgcactcacttgtgacaagtgcgaagagctccgaagactgatacatagggagcacccaaggtgcggtaaggtcattcattgaccatggacgactcggccaccgccggcgaccgccgcggcatgtggtccatgatcaaggagggctacgaagggctcgtgagcaccgtgatccgcccgctgcgcgcgcagtacgcgccgtcggagctcggccccaagcgcgcgcagatcggggacgtgtcggtgcagcgcgtggacctcaagctcaagaacccggcgggctacacgctcgagtgcagctggtggaagccgtgcgcgcccaagaacggccagacggagcaggacaagcggccgtgcatcgtggtgctgcacggtaacagctcgtgccgcctcggggcgctcgagatcgtcatgtacgcgctgcccgcgggcttcacggtcttcgcgctcgacttctgcggctccgggctgtccgagggcaagtacgtgtcgctcggctaccacgagcgcgtggacatcgccacggcggtcaagtacgtgcgcaagaccggggaggcctcgagtctgtgtctctggggacgcagcatgggcgccgtcgcggcgctcatgtacgccgagacggacgcgtccgtgaacgccatggtgctggactcgcccttctcgagcttgccgcggctggccacggagctggtggaggacggcaagctgggcgtgcccaagatcgccgtcaaactggtaatgcgactcatccgcagggatatcaagaagcgagccaagttcgacatgttcaagttgaagccgatcgccaaggtgcacaagtgcgcggtgccggcgttcttcgtcgtggggctgcaggacgagctggtggggccgcaccacgtggaggcgctgtataaactccacaacgggccgaaccaactgttcaagttccccggaggacacaacagcccgcggccgtttaactttttcatccaggcgctgcagttcctgcgagtgatggtcggattgatgccgctgccggacgatttatcgaccttcgacctctcgccagcgcagcggcaacaggtgcagacagggaaagcggacaagaacgtgtcgccgaagcgcaagaaaccctcgcgagtgtacaagaacccgttagagcccggtgtttcgatcgaggccgtgcacaaaatgtctattaaggagctcaagcagtgcatcgatcgcgccggatacagcgacgtcacgtgtattgagaagaaggagatggtggatctggtattgaagctgtacgcgcgctacaggcgatccagcaaacaggcagccgacgatgtgcagcaacccaaggtgacgacgtcagaggaggaggagactgataccccgtccagtaacgcagagtcaagccccgtcaatgctacggatgagagcaaaccagcgcccgtggatacgtcccagccgcccagtgctccaagtgcaggaagacatacacccacacctacaggtcggcgtcgcagtgaaggtgatgtccgccctggtgcaaagtatgaagaatatgctccgacagattcaccgactttgctgtcgtcgatgaagagcaacgcgtccagcatcctctcagatgcagagttggctcgacgattaagcatcgaccatcccagcgatggcgaagatgagtcggacacggcgaagcttacgaagtaagtggggtagtggttgagtaggtggaccggactttgctggtgcagtatatagaatccagtgctaaagtcgcgctgcccaacacgggatcgaccagctaccgagcgtttgctttacgcaattatatgtgatgtagacatgaagtgataacggcaacagcatacatcgtgggtctcgggaatggacttggtgtgtacatgaggacctaccgggttgctcggactattcagtacatagtctcttgactatgaaaataatagccacgtgggtcaagcaaggacagagtgatgggtgcttgcccgcgtaatgatacttcggcttcatgagcttcacttcccaccttgcagcctccccggcaaagcctccgccaccacaagtcctgttcaggatgctgagcctgaacggcgccatcttcggaacccagtattggcttgaagcacaaatcggccaagaggcgagggtcgctgatctccaagttctcattcgagagaacatcgccggcctcgtgggtgacgacgcgatcgggctgtttaggacctggagaagcgagagagacgaatggctcaaaaacactagtagcgagttgcgacgccttcaagcaggcgagtcaacagcgtggctgagagcgatgattgaaataggtgcttggatgaactcggatatgctggtcggtgatttctcgtttccggaggcacatgagtgtgaagagagcgactttcatcttctagtgttgatctcaccgaagaaaagtatcatacactttctgctttgttgttgttttgttctgtatcttacaaaagtatttttgttgttagaaccaacgccgaagaaggaggtgaccgcgttctcgacaggtgacataaaatattttgcggtgaaggagattcggcgctaactttgttttgccgctcgcgttgtaagctttcgattaggctctcagcagaatgcgcgaagtcttcttgccagtacctggctaccgtttcgtgctgcttggtgccgactatcagctcgtcgcccggagtttcccaatgagaagaaatcagaatagttggacgaccaactcgcactctggtggacaatgagagtggcgagtaaaactttgaacgttgaaccagtgtattacttctctcggagtgcggaatcgccgaaatatagccataccgcgaggtattttattattgattcgaagaggttccatgtcaatctcggtaatttctcagtcagcgtcgtgcagataaccagctctgcagtagtttgcgatgagaatgctatcaaagtcagcgagctcttgagcaatttggccacgttcatattcctccctcgggtttatttgtcgcggcgcaggtcatactccgcctgaatctcctgcgcggactttcctgacgtctcaggaacgagcctcaccgccagaaggtaaaagaccacaagaagcaccacaaaaggcacatatgcataccttttcagcgctacggagacgtacgggtacgagacgccgacaattaagttgcacaaccagttgatgccgatgcacaaggacgacgccttagcacggatcgagtccgggaacatatcggccgtcatgacccacacgagcgggcccagagtcacgccgaacacgatcacgtacagagctgtgaatacaacggccaaaaccgccacgtccatgatgaaaaccaccgtcatcccgatcgacatcacgaccatgcccgccaacccccacaggatcatgttgcggttgccgaagcggacagcgagcacacccgtgaaaattgccggccaaacgttgatgaagtcgatgataagcgtgcccacgcgtgagtctgaaacgcccgtgtcggagaaaatgcagccggagtagtagaacacggcgttgattcccgagagctgttgggcgcacgaaagcaagatggcacccgcgagttgcaggggcaaacaccgactccttggtgggcggttcaccagcaatcctaccctcctccgaatcgaccaatttgttcgacaccgccagccacgacagcaccttccgacatgctgttcaccgtacaggcgggcgatcaccaagcgcgcttcctctcggcggttctgcgtcagcaaccacgctggactttccacactgagtgaaggtgcaaatagcaagaacaaaactccgaggacgcacgggaacgccgccaagtagcgccagccgtatccatagctgctttccgcgacgacgaagaagtaaatggacgggagtacgatgccgatggtaaccgaaatctgcagccccagacccaaagtgttgcgcatgtggggaggtgacaactcgttcacatacgcgccaatcgttcccgttgcagtaccggaagccaacccggcgatgaaccgccccgcagcaaatgcccaaatactggatacagtcgcccgagtgagacctccagcgatcatgaagatgcaattgaacagcagaaccttcttacgcccgaacttgtcgctgaagtatccgcagcacagagccccgatcatagcgccgaaaatccacgcgttcacggcgaaagtccactggacttcgagtggccagggaacatgaggcacgtgcctttcgtcaccggacgagcgtcgcactcagacgttgtgttgtaccgcgacaggttcatttgtgaagtagaccatccgctctggaacggttgcagcaacgacaccaggacgctggtgtacaagagagccttgggcttgagttgcaacgcagcagccttagtggtgtcgtcaaaggctcgaacgtggatgttgacgcccttgttgggggtgtcaataccctcaaagtacgccatgtcggttcgattgtgatgctcgggcaccattcgttcggtcttctagacaacagaaacgtttgcgttcgtggcgtagtgctgttgtcttagctgggtaagctgaaagtggaagatcggcaaaattgcacgcttttttcggggtgattgattgattactgcggattactcgggtagatacagatcgtgttgaggctttgaagttgtagcttggagttgaagcggttggatgcaaagccgaaggccgacagaaccaaccattacgattcggtatctacattagcccccccccctccccccgcactgcacgttaacctgtacttaggtaataaaaacaaacatttacagcaaaacttgacatacataagtactctttggcaaattgaccaatgcgtgatgccatcaaccccccagtcggtagtacgatagatacgctcaaacggtcaagccggttgaacttacagtttaatcgcccgtcagtgagccgtggtaaggaccaccccgtcgatcgtttgatgtatgattccacgtgcgtgcgttcctgctcaccatttcgtatcgttgccaatcctaccaaaaaatcattggcctaatttgagaacttttggcgcccccaaattgagcttcaggttcaggtaggccgggcttggcaaatcaaaaagcgcaggcaagctcatggaagccaacgtaccgtagacgattgaggctcacttcgccggcgttctttcagttggggatcgactccaactcgtgctatgtgaaggtacatactcattttcaaatgcgttgtggggtgtgctaattactaagatactactacttgttgtatattgatgtagacgtttagctggtggcaagcggatttattcagcatgaaaagaaactggtaatagactgcattggtgctgattggcggtgcatgcagttcggattggtgctgttgggtccacatccacgctttcgtttgttgcagcttgcgcacgctgggcctgttggccgtgcactgttgagcgtttgactgtatacaaatgcaggtggtacaggtgctgggtttgaagatacactcccggataccggtgctgctgttggcacgctgttgccttctgctgcctgtagcactacgcgccgtttacgctctgcattgagtcgacaacgaagtttgttcaaatccaagcttccggacgggtgcatctgctggtactttgcgacgatactcggccactttccgtgagccccttttcgaaaactagccgcgtgctccagcagagcatctagagtggtttcgtccagaatttcaaaccgacttctttttggtgagtgtggagcttcttggctacttgaattactggagttggtcgctggatgggatgcgcagccttataaataaactctttggagattcggtcgcggtgaaacaggacccttttcacgtcattcagaggctcacggaaaaatgttctgatcaagctcagcgaggctggctcgcgaagcgacttttggcagcaatctacgacgtagaaagaaaaattcgatcgccaagtgcaacagcagaaaaatttgcggaagctgcctctagtgtgccaacatcaagtattcgtgtatctaccagtgaatgggagggctgtgtcaacagcaatctcgagcagattaggcaaggagacctttttgttgaggagagtgactacagtgaaggtggcagtacggtgcgagtggtgtctacaagtcaacttgaagcgattcattcaaagttgagaaaacttctggatcgggcgctttcgatcgaggttgggctgcgtatcctggatatcttcctattacaggttagttttcttgcaggatatttttttactggacggtatgttaaccctttcattatggttgtaatactagcataatgtcaaggtcggagccaagtttaggcggaatcctgaatttaatgcggttgacttcataacactgagtcgcagtgctgtcttatgccgtggcattgttcctgattcgcctcagctagagtacgtcaacgtactgctagcaactcgtccaggcccggttagcttgcggcacaagtatagacccggtggcgaggaggctcctgttcaccgcccatgggaagcactttacgacatgatcccacttcaagcagagcgagcagaaggaaccttgctgcgagatgacacaacacagaccgatattcagaagctgctgtttgcttcaaggcatggacgtaatgagctgagtcaacaagattttgtcgaaaaccttggtttggaagctgaatatgacgatcccgcagagttttcagctcacgattttgccctgctaaagttactgcgtgcagagcagcttgcggctaagattgctaagtgggaatcctgcgaagttgtcgctacgatactatacaacactgctgtcagacggctcgataaccccaatctggacattaagaaacgaggcttccgtgccattgctcgcagacttgctgtaatcgactcgcaacttaagcagccttcagcgaaggtggtatccagtgtctctcgcatgctcgtattgaaaggatccactaagctcgatgatgaaaccaatttgccgaaagaaaaggctctgcaggaagaattgttccagctacttcgattaccggtcggtattaagcacgtcaagcaagtctaccgctccgtgtacgattttgctgcctacacatgctcgggaatcaatcagaagagtgatgaatttctggagtgacgctgggattctttgcgccggtccgtaagctacaagcgtcgcagagatgaaggtgtcgaactcaacacttcttcgtgtaactccatccaacctccaaacgcctccgtagaggcactcgcgcaagatccgttcacagacaataaagtatctcgtccaccgaaacctcttgcaccggtagatgcttctacacagcagctacaatttggcatggctgtttgtgtgtcagtaccagcgaccaaccccagtaattcaagtagccaagaagctccacactcaccaaaaagaagtcggtttgaaattctggacgaaaccactctagatgctctgctggagcacgcggctagttttcgaaaaggggctcacggaaagtggccgagtatcgtcgcaaagtaccagcagatgcacccgtccggaagcttggatttgaacaaacttcgttgtcgactcaatgcagagcgtaaacggcgcgtagtgctacaggcagcagaaggcaacagcgtgccaacagcagcaccggtatccgggagtgtatcttcaaacccagcacctgtaccacctgcatttgtacacagtcaaacgctcaacagtgcacggccaacaggcccagcgtgcgcaagctgcaacaaacgaaagcgtggatgtggacccaacagcaccaatccgaactgcatgcaccgccaatcagcaccaatgcagtctattaccagtttcttttcatgctgaataaatccgcttgccaccagctaaacgtctacatcaatatacaacaagtagtagtatcttagtaattagcacaccccacaacgcatttgaaaatgagtatgtaccttcacatagcacgagttggagtcgatccccaactgaaagaacgccggcgaagtgagcctcaatcgtctacggtacgttggcttccatgagcttgcctgcgctttgcgccagctgagtcgccgaaaccatatcgacgcgggtagatctactgcaacagtgatgcaggatgcctagcacgatcaaggcctcgccccctgttcttgttagccacagcactagtcagagtacaggccgcagcagctctgagcagccacttgatacggctagctgtggtaagtctgtcccgctcagtagtcggcttcacatcaccactagagtatgctgccatatcagcacaagcaaatcgaatagttaagaacataggtcaccgcatacatctcattaggatctgcagcacttacttcatgcaccgtccgagcttgcgggcccgcagtgcctccaccgcagtgacggttactgatcttgttggcatcaacttgctgcttcgggcgagcttgctgaatgttgtctcctattggctgttatatttgtcgggggtcccaggacagatgtcaggacatggtggtttttggtgacttttggtggcagttggtggcttttggtcccaggataatcccgacaataccggtcaagccgcccttcgggtggcggcggctggcgggccgcaaccccggtcaagccgttctctgttgtctactgtttgaatctcctgacatccgcgaatatattctttctggtgggctatgatttccatttcgtagcagttgtatttattgtacccgaaactttttgtctgatatcgatatcgattccaaggcttctcgaagatctcactcaccggggcgtaagcattttgccagtgtcaacaaactgtattaatgccacatggcagcgatgaatatataaaaaaatagccgcctgcagcactgagagaaattcttgtcgaccatatcttgggaatgacatccaccgtacacatctatacggtgtgatggattgcgcacttagatggcaacgcatacgctcaagagctattgaactagttccgagcacgacacaaacgggcttgagtgggttcgttgcaggagttgcgactcaatgtacggtaacgcactctaaccatcaaaacctgtatcgctcagcagcacgcaagacctggcactcaccggcaatcgtactgcattcgctgccaccactcgccactcgctgcaggggctctaacgagacagcctacgtctccgcgcccatgagacggaggaatagggacaggtactttgtgaagtatacatgctatcgagcactggccacgttgtgttactgccgctcttcaagtccttcccagtttcacgcagcaacgataacttacgtcggcattacagacaccgtagaactgaaaatgtgtgtgccatcgatatcgccacagtaactcctgctatcatcgttgcgtacagagaggtacgtcgtcgggagctcgttggtatggaggtaacgcgttactcatagcatccaaacgaatgagttgcgatgcagaagtgtcgacctcgatgggaacgcgcgtggttgcacgccagcggctcatttatttgagcaggctacaagcagtagcgctcgcctgcaagtgcatgcatgtacttagacggaaaggaaagagcgctgctgcacgctagaatcaagataacgagatccgctcaaatggccagcgaatgatgaatccagagtgcaaacgcctggggcgttcgcattgtgatatccgtcacgatcctcgaaacgttcacagacgacggatggttgtgtctgaccgatttagtgcgaggacgataggcaggtgaaatatctggtacaagttcccccgtaagcctcgttcattatccaactagcttccaatcgaccgaacacgtttcttcctttacctgtggatcttataccgtcgtttccgagctactacgagtctgaagtgcagtcgactagcatctactcagcaacagactgtcactacgaatggaaggctacttgattcgcgtaccggttgaagcttgcttccccgactcgcgtcctgcgtggagacaacggcctgatggcaacggaccggtccggtcgcgggtgctgtactacgtgatcgaagaaggctacttgcgcggctacgagtcccccgactcggtcgatgagcccgtggaatcctttcagctgactacgcatcgcatcgaggtgaacgccatgtactcgctgaacattttcgagttgaaggcgcgaattgcgttggtgccaccagtgcaacaattcgtggaggacacgtccagctcgagctcagacagcagcgacaacgatgacgcctctggtcgaccagacccccacgcatttgtgccccagatcgctgtttcctcctctgtggaggtcgtgagtgggagctaccacgtcgtcttcttcgcggccaacaaggatctggtcaagaagtggtccgtgaagctgctgaactggaacaggttcgtgtttgggtcctcggatgatctcgatgaagcaggactcaagcgagcgaaggccgagatagtcgaatccctgcacgtaattaacgctgccgaccgattcctgcgagcagttgagctgcgaccaaccgatgtcgtgaccaccgacaacgctgtgaaccgtttgccgcctgcagaccaaccaagcgtcatgcctgctccaattgacctggcgagcatgacagcggtgcacaacgccctcacgccgactgagacgaccaagatcaccgactccgctgacgtcgtaaagccatccgactcgaatgcacagacgtccaacccctggtggatagctccgttcggaagaacgaggaagattacgtcgcattctctaagacgttagttagaacaagctgccaagtgagtggctttgagaatggatttcagcctgcaaactgtagttggacgcatccttcgaccccatttgtttctgtgaactggcactgcagtatctgcgtgtaggtgcccaggatcttgaactcccttgcttcttgttgctcaggtctgtcacttttcaaaccatttctagccgggtattttgccgctgatgcgtcttcatccatgggcccgattgattcactggggattacacgatacgtcatcttcattgaaatctgtgcgctgagagctgatcgcttggagatgctgatttcaatcggctccattgactgtgcgtcggggcatatacagaacctctcgttgccaaagagcaggtgtaaggtatcaaggatgtctcctcctccgtgagtgcgtgaactgcagatgatgacctgtcgcgcaaatcttagcgctgtcatctccttggctgcagcagacaccgatgcgatagtttcaccttggttcccaccatctcgtccgtggcctgattccgtgcatctcaaaatctcgagagtcaacgcgaggatgttcgcttccaacgaagctccagcgaggagcagcccgttaattttgacacggtcccgctgcagatctttcagcgcttggctgagtgtccacgacttgtaccgctcttcccgtgccgtcccattcagacgatcgatctgcgagtagagtgaacgaagcgggatcactagcgaatgctgctcaccaattgtagccgaggactgcgtcattatctccacccatgtggtcaaaggattcaacttctcggtacgttcgccatccgtctcagcttttgcagaggcgtcgtttaactcgcggatacgcgcaaagagatggtttcggctgatctctgctgagatcaatcgtgcccatgttgtggcttctgcggctgtgactacatccaacaccaatctcatcctccccttcgagtcgaagaacgcgaaggcgttgcgatgcggctggtccgagtcctcatttggaacgctgcttttgcgcacagtccagtccgtctctgatagatcgatttggctcagcggactgttgtctttcatgagccgcttgcttgtttccgatgcactgccgtcccgctcacgccccatttcaaacacgaagtccgcgcaatgtgttcgacttgagaagaagtacagcatgtggttatcacagagacaagcgtactccttgcgctgcgtcctccaaaaagtaccccactctgccgtcacgacccacccttccaatacaatagagacacttccatctttgccagcgatatcccacgacaatcttcgtaccagattctcttttgagtcatcataaacagggaaggtctcaggtcgtgaaagaccaacgcccgtgcgcgtcaaatcattaaccatcgcccttgccaaagccaacaggtcgtctgcactcagcgaactaccacccagtatggcatctcggagaacaaataccagctttcgaacgtcctgctgaagaagttgcatgcgttcaatcatttgcatgcccgcttggagaagaatgcgctccgcgtacttgcgcgctttggcggacgccctacgctcttggaaaccggtaaacagcaagcgccttcgcttgcctcgggagttggggcgtcttcgagcccctcgccttcgtagagctgattgcctgacagtcgagttttggactaaattcctcagctttacctctggatgagccttcagcgctgctggagccagtggttctatcgccacactgcagctttggcatggtgctggcttccttcgagcacttcggtcctgatttagctgccagagcggggttatcgccgtggacagcggccgaagctcctccactgtcctgggagatgacgacctaaaaagtggcgatatcctagcccgagattgctgagagctgctctctgggatccactcggatatctgtggactaacatgctggaactcgaggatgtccagctccttaacttcatccacgaccagcatttcggccaccagctctgtacaccggcgcacgagagtgagctttcctcggcgaaacgaggctttggatctcttagccaaactcggctccgtggctgggtcggcgtcacaataattatcagcgcaaccttcacccccgttcctgtcgactccagcatttttctgcatagctcctcgcttccccaggacgaccaggagatccgctacagtcatactcgccgcgcattccactcgaaccagctcgtccgtcggtagaacaaccctgatacaaactcgacgtccgttagcgcacaccctttaggcgtcgaacttgtcggctgttcgtacctcacacacgtagtccccttcatggtcactagatgatctgtggcgccgtgctagcggccgaatcttgcgcctgcgctcgaggttccgtttcatgagccaaaggccgctacgccgagacttctcctaagcgtctccgctagatcctcgaagagacaccaccatcccgatttaactgaagagcgcctttgtcttaatgtctcaatgctacctgtttgctagtgcgggatgtaggcgttcccgaagatgtcggggctatctcgagcgaggtcccagacccacggctcatcctttttcgggttgtacgtggtcaaagggaatgcgtacgggagtggcagcagctctgtctcggataccccaacgctggaatgtttagccgctttactgccaaccgccacgaggcgcgcaggagggccattggcttttgactttagtagctggggcaggaacatcacgcccaactcgtacgacctgatcatgagctgggtcttgttcttctgcagtgcgccccacgcagctttgctcaagttcgagctcgtcacgatgacccagtccagttcacccgctttctcgtcgctaggattgaagcgagcatacgacttgatgtgcggcatggcgttttgtcggtgaagctcctccggcggcgtccatttgcggagatacttgtgcaagaatggcttcatgttcttcagcggacacgggattgaccgccccgagttccatccttccagtgaattccgctgcggttaccgccaacaaagccgagtgagtaaagcgtggtgggtcaaaaggacaaacacgagagaccattttgctacgaaaagaaagcttaccacatcgtcgacggagggccaaataatgtgcagtgcctgaactggcatggatgtcggggaaacgttcttctttcctggcaacatgctttccgcaaactctccgaagagccatttctcgtctagcgaccccaagcttgaaaactgcagaccagacggcactgcttagcgcacgatcgtgatatcagagagatcaccacgtattgctactcacctggcagatcaacgggttgtccgtcgggggtactttgtacatcttcagaagtctaacgtagcatagtaagaaaacagagcgtggtctgttaggaccacattccatccttcaaaccgaccaatgcagtagcacttacttccgtacacgaaggtgcccatacttctccatatctggaacgacaatacagtcagtcaaccacttaagcgtcacgatttccaacacaaactgttagctcgaacctcgtaccttttcctttgtgaactcctggtactgaggggacgagcgcgacgcgtgcagcggagaagtcgaagcgcatcaattctccacagaaaagcttgacttgtgctcccagggacgacaggtaatggacaaggtccgcctcgaagtcattgattgctgttgagttgtcggccacagcgtccttctcttcatcctcactgccatcaagcaccttgagcccaaagtcctggaaccacacgccctgggtcttggtgttccagtcgttggacaagaagttggccgtgaatatcgccacccgcaccttctccgggtacagcgccaccagcatcttggtgtggtgcgtcccgtacgcgatcggcagcggaggagccaccggcgtcacattggcgtactcccgacactccttcatcatcctacacccgccgcaaagcaacagcaacaaacgatcagtacatatacgcactcaactgagcggggaagatactgcagctctgtcaagccaacgcacccctgtcggtctctctcgccgtgaaccaacagcaccggcacgtctctgagcctcggacactcggcgaacagccacggcaggtcgtacatgtagttggtcaatagacagcgagagaaatccccctccagcaggtcacccaagctcttcgtatgcactggaacatgcattataccacaacataaagtcaatattcacgaatagaggaatgcgcttccacttgaccgcaccgttgggcgctgccggggcatttttcaggcacgtcaagtggaacgcgcactcgcgagcgtccacagtagcaggcggcgtagtggcgccttccgccgccgcgagcttctggcgcttggatgcccgctcatcgtccgccatcacttcacttcaactgtccgtttttggctaatatcggtgtatttttcaaattatccagaaataaggcgttatttgtggactcactgcggagttggccgagcagcatgtccggaggagcgggcggcgatgtcgaccgcgcgctgagcagcatccgcgcgcgcgccgaccacctgcgccacacggtggcgcgcctggagcacaacttggcctggaacccggctagtacctggtgagagcgcgtgctggcgtcgctatggcgggctgaagggcacccttatttgggggggacgttgactcactctgtgctgctactgtcgctgctgctgcgcttgcaggccggagctgctgagccagtacatggtcatctccaagcagctggagaacatgaacgaggagatcccggacctggtgcagcactttgcgtgcgtgccgaggatgtcgacgcccaacccggcggacatcccgctgctgctgcgcacccgagaggacccggagatggaggaggaggacaggcagctcatggccgacaagccccgcgagaagaacacggaggcgctgcagaagctcgtgatggcgcacaacgactcggtcgagagcctggaggagacgttcaacgagatgtcggacggcctgctcaaggccatccgcgtcaacaagtacgtggtcaagtccaagccgcagagcacgcagagccagcagttcaagtacatcgagtccggcacgtacgaatagacgcagaggagctgaagttgaaggtggaggtggagccgagcggagctcttgtggacagcgagccttaatgttacttagttatattctttggtaccggctcgggtgtggtgtatcttttgggttggattcactcgtcggagcctcgcacagaggagctggtggtgtctagggtgtcgcgcttggtgcgcagcgcagcgagagcattgtccgcgctgatgtacgacggcagcatggactcggtgtatcgcaatcggttccaagcagggaggaacggcaggccgaggcagtgcatgtgcatgtgcggcaccgacgcaaacggcgaacgatgaaaaccaaatctgaaggcaatagcaatgcaatcagtacccagcgcggcaagcttgcagcagcgatcagctccactgcaccagccaagaggtaaagagcaaagtacccaccggcagtttccagcgtcaataaagccatctttcgccagtatttccttccccgtcatcagcatgtgctcaactgcagcaccggagaggtaagtgccacaccatacacagaccgttgtcagttgtaaggtggaccaatggtagacgacaggagttgaggtcaagtcctgctacgtacgcagatcgtagtgggccggcgtgaggtcatcgacagagcggatgtgctcgtgcggtatcactagcacgtgcttcttcgcgcgcgggttgtggtccagcatagcgatgactcgcgcatcctgcaacaacagtcaacagcttcagtgcgcttgaaactcgacggagagggcgccaatccacgcgctttcaggcccaaaatctcatctcttctcctcctcctcctccttcgtacctcgtagacgatgtggttcctggctcggagcgtctcgcagcagaacgcacaagctccgcggacgcctctcatatgcgggcgcttgggcctgacaatgcgaatgcccgctcaatgcagccagcacaaccgtgacgtcgcctcttcgttaagtacgatgacgtcgtcgttcccactaagtccgatctccctgccgtttttctcaatgtgcggtccactcgcgttccaaaagccgtcgctatggccactccgaggaaggaggagcgctacacgaccatcgcggacgccgtggccgtggtcgagaccttcgctgagcagacgcagcagcgccacgtacgcatccagcaacatcaagcccgcagcaagaacgcagcagcaacgtcagtgccagcgctcggcttctcctcgcccgctgcactggaagacgacagcaatgcgccgacctccgcgctcgccgcagtcgtggccgcctcgtcctcgtccaatgccgtcgtgctggagtgcgagaacgcgccggcctgcaagtggttcgtgcgcttgtccttcgtcaagggcgagaagaagtggaagatctcgagcatgaacgtggagcaccacaagagcaactgcctcgagagcaagagagcggttgctgcagttgcggcaagtagcgacgcagtgggctctataggctttacgtcgcccatgacgacggaccagttgctggccagcgccaatgccagcgctgcagcggcattggctgctgccagtggagctggaggcgaagctgcggccatgggcgcgtccgtgtatgcgggcatggtgttcatgagctggaaagaggcgatcgcagctattcgcactctaggacatcacatgggacgcagagtgatggcggagaaggccacgcagatgatgtggcgcggaaagagcgtcatggctcgacgggttttgtgtcagaaccaccgcaattccaactgcgggtggatggtggtgctggacgaagccgacgacgggtcggaccgctacaccgtgttgtctctgagtctactgcactcaaaggagtgcctggagacgtgcaatttcaatgcgcgcaagaaggagacgccagctgcagtctccaaggcggacagttctacggactcgttagggctgacgccgtctagtgcgactatggtggttgacgatgtgtcaaagtaccaattgacgcacgatatgcgctggagcactggcaaggaggcgacgaaggcgattagcgactttgctcttgtggtgcagcgcaagcggtccaaactgtgcaagcgcaacaacggcggaagcaacaagaagtacgtgtgctcggacgagcagtgtctgtggtttgtgcaactcgtcaaaggctggaagtccaagaactggaagatatcggccatgaacctgaaacactcagacacttgcacgggtgtggcgaagcccacggctcgacagcttgccgagatgcggttcttccgccaggcggttatcacgcactcaaagtcttcgggtaggttgctaaccgacaacttcttgatgcactccgagacgggcatcacgattcctcgtggtatggcctaccgtgcacaaaggttggtcgttgctacatctacggacgaccttacagaaagttacaagttcatcccgagcctgatcgagtcgttcgcaaagaagaaccctgggtcggtcgtgagctacgagaaggacgtacagggccacttcattcgcgcgttcatgatgccgaatgcgtcgacggctgtgctggcgaaccagcaacaaatctgtggtatccaggtgctgcactacgatacagtgagctaccagggctgtttgacggtactcgtcactcgggacggcaacttcgagtaccaggctctggcgttcgcgttgctgccgacaagtgaaatggaccacatgaagtggttccttaggctggccaagcgtggcggcgcgcgctttgacgggaatcccgtattttgttcgcacagcgagaacggccttctacgggctttggcgcacgactcacgtcacgcgaaggttatgttctgcgtgcgaagcctactcgatgaaatgtcacgcgacaagaacattcctgctctcggcccgctggaggatatggtgtgggagctgcagcgacaggaaacggaggaggcttttctaaaggttctcggggatctcgacgcgctcaatgccgcggctgcagcatttttgcgtgctgttcacccgaagaattgggcataccatctcaatcgatcagtcaaactgtatcgctgggccagtacaggcgcggatgaggcagtggttggttccgatatccagcgcagcgatgaggcccccttcgatctcatgtacacgttcctggctttcctcatggacggcgtgtacaagaagagtcaaacggcttccaagctgctggcgggtgaaggccagtcgccgtcgttgcttacgccgggagccgacgcgatataccgacaggaattgcaggatgcggccgggttcactgtgcgcaggtgtgacgagcaagtggcattcgcgtggctgacaggagcgcggccgaaaatcacccaccgcatggacttggcgctgcgtacttgcacgtgcgggcagatgttccaactcggcttgccttgtcgccatttcatcgcggcttcaatgcacttcgccaacgaggcggcgctgctggacagctttgacccgatctacaaggcaacgacatacgctggagttcatcgcaacctgcggatcgagattcctgctggcggcgacttgcacaaggaccagtcgctgctcccagcgctaccggcacgcaccaccaagtacaagaagcgcccccgaagtgctgggagtagtgccgcctcagcgtctaccacagacacgtccactgctgtcatgagcggtgtggcgtccgcgaggtccgtcgccagtgaggactcttccgccccgctagccaaaactcctcgtctcgacgaattcgatacggacgatgtcaacagtctcggagagattgtgtaatgttgtgaaaacgtggtgggggggggggggcattttctacgagtacgaacatgtctgtagctgtgctacagcaaaaaagaaaaatcaattaatgttttgcaagacactgcacgtgccttcactacttgctgacgctggccttgcgcaccaccttcttgccgccttcagtggccttcaacgcgtgtgcgttcttgagcttcgtcttggtgtgcagcagcgacttgcgcttcagcgccattctgtgcatgtgcagcgagttcttggctggccgtgcacgcaccagcaggtcctggcccagcggcctcaagcctgagcccacccccgcagtggcagggagcacgccggccagcgagatgccgtagttcttggccaggcagaactgcaggtcgcgcggctccagcgtcgtggagcgtctgtgcttggccagttttccggagaagtccaccacgtccttcacgaagtctgccgccatgtccagcagcagctcctccacggccgggtggaagcagtacttggggtcgatggagcgcagcagctcgcccagctggcggttgggagtgagcgccctgttggtcgtgctggcgctcgtgaacgagttgaagggcggcgccatcggctcgtggtgggtggaagaggaggagtcgcccacggtcatgagcgagttgctgagcagcgcggacgccacgcgcgggctcgcgaggcctcggccggaaggcgacagccccgccggcgaccgcttcttcttatcgcttgccattttttgcgaatgattaaattcgaaggtacaactgcgtgtccaactaatagggtggtaataacaaaagtaaactttgggggaaattgcaatttggcccctctacaaaacaaattcggtatgttcatgttttctggatcttacattcactggatatatccagagtccatccaggcatggggcatgggggctgcagatttcgatttcctcggtgcattcaggcattgggggggggggtaaagtgatttcattgtgttaatggaccaaagccagaggcgctctggttactaggcaaggtgccgaatggcagcccccaatattagcccactaacacgttgaatggcgcccccccccgccaaggtgattgtcgccgtcgagtgccgtagccgtcgaatgcaaaagaaatcgtgctcgtggctggagtcgtagtcgtacttgagctcatgatcgtatgcgctcgtgtcgtagccagagtcgttgtgccggtagccgtggttgcgatacacctaccggagcaaaaataccagacgcccgattttgctaaaaaaaaacgaagcccagatgtatttatcaaaattactaaactgagcactctgcctcaagtctctcaaggccgatcttctcccttgatacctctgtaggtagacccggaaaaaaacgtatctatagtgaaacaaacattgcagtgtagtctcaggtgctcgacaatagccttcttcattgcagcagtgtaaaatggaagggcccgcgtcgttttccacctgccttgacctccagacaggcgagggtgacttggtggcgcccgcgccgttgcagaaatgatcgcgcgctgagcggccgagagtgcaaaaaatactggcttgaaactggtgtacagatatttcgacgactccgcaccctgagcagagtgataaactgattgaaacgttgaaaactttactctcaatctcgaggactgtccgcctgagagcgcgttaatcgttcaactattcagatttcttgtcattggacagctccgggcaactagctgacagccggcaccaagcagcacgtaacggtagccaggtactagcaagaagacttcgtgcattctgcagcaacctaatcgaaagattccaacacgagcggcagcagagttatcgtcgagtcgcaattctaacgcaaataaagtgtttgtcacctgtcgagtacgcggtcacttccttcttcggtgtgatttctaagcacaacaacaacaccacaaacgctgttgtaagaactccagaacaaccaaacaacaaagccaaaactgcgacgtatgatacttttctccggcgcgatcaacactagaagatgaaagtcactctccttacactcatgtgcctccggaaacaagaaatcaccgaccagcacatccgggtccatccaagcacctgtttcaatcatcgtgctcagccatgctgtgacctcgcctgcttgaaggcgtcgcaactcgctactagtgtttttgagccattcgcctctctcccttctccaggtcctaaacagccagatcgcgtcgtcacccacgaggcccgcgatgttctctcgaatgagaacttggagattggcgaccctgccgtgtggctccatttgtatttcaagccaatactgtgttccgacgatagcgcagttaacgctcagcattttgaacaagacttgtggttgcggaggctttgctaggaaggcacaagggggaaagtgaagctcgtgaagccgaagtatcattacgcgggcaaacatccatcactctgtattcgacccacctgcccacctgattggtcgagagactactgaatagtccgagcaatccacatcgaatataccgaatttgttttgttgggatccacccacctatgggatagtattagccaatcacaattgtgtcttcagattgacagggcttgacttgttgagggatacaccactggtgtgcaggggctaatgttaacttggtattaatgatattttttcgaatataatattgataatattcggtactaatattatatgaggtacctaattagtcgtgccatgactatttaccgtgtacgacctgaagggcgcctcaccctgttttgaatttcagttttctcggaaacaattcgtatttactgaaaacaaaatataccacgcaattcgtattgccgagatctacccgaaactggtctcctttctcaatttaaggtgaaactaaaaataattttcaaaaccgatggaatgattaccataggtgcacgactatttaggtcacacgactaattagggtgaacggtgtagtcaaacccgatatcaatcagatatttcatatatcatttcaaatctcaccgaatatcaaatattttatatgatatttccagaagacctccgcctcttgcctctaaggagtgcgcttcctccggtaggagttctctcagcatggcaatgaacatcacctagagcttgtgctagcagtcgtgtaagatattttgttagctcgaccccacgtaaaaatattacccacgaatctcatatttgagctggatacactcgatatctaaacgagcacgctgacatgtattattgtagtaggtcgaggatttacagacagaacaccaacgtgggcgctggaatgcccaaagccaccgacatatactatgatagtgctgcttatgttcttctgctgctctctgggtaaatcccaaactcccaatggcctccccgcccggtataggcagtccaggaagaccggtaccccgattactactctcctatgctagcgacaaatttgtcaaacaatgcagaagtattataataacaccagatcgttcctttaaaagcctgaccacgcgaattcagtcgcaatgctacagagtatatcgacggctccttgttgcgagccacggaagcatgatccctatctacgacggattgttttgcgactgattcgagggtacagcgatcggtattttgcgcagacatgtctgacagcctggctaaggctcatgtagtactctaatcactggcctcgtagctgtatccaaatccaaataaatacccggtccaagtattcagataccttggttaccatgtgctcgttaacacgttgttctaatacttgttagtattgcaacggttcaaacgtaccaaatagcttaagtgagtacacaaagaatgtgacgctgcgtcaatggtttgccggatcaacctgatattgcctcaatctagctaacgattggccaaaactactagatatacgccatcatttcgtacttaatgagatcttaatatatcatataatatatcaatattcaatattaatgttatttttcccgaggcatcaacatatcacataatattttacatatcaaaaccgaaggtgctcgatattatatcaatatcaatattacccattttcgagttaacattagcccataccgcgagatattttgttatttattcgaagtgattccatgccgatctcggtacttttcagataaccagctctgcagtagtttgcgatgagaatgctatcaaagtcaacgagctcttgagcaaattgaccacttctattgtcaaatgtgctcggagttatttgtcgcggcgcaagtcatactccgcctgaatctcttgcgcggactttcctgacgtctcagaagatagaagattgcaagaagtcaaaaggcacgtatgcataccttttcagcgcaacggagacgtacgggtatgaaacgccgacaatcaagttgcacaaccagttgatgccgatgcacaaggacgacgcctttgcatggatcgagtccgggaacatatcagcagtcatgacccacacgagcggacccagagtcacgccaaacacgatcacgtacagagcggtgaatacaacggccaaaaccgccacgtccatgatgaaaaccaccgtcatcccgatcgacatcacgaccatgcccgccaacccccacaggatcatgttgcggttgccgaagcggacagcgagcacacccgtgaaaattgccggccaaacgttgatgaagtcgatgataagcgtgcccacgcgtgagtctgaaacgcccgcgtcggagaaaatgcagccggagtagtagaacacggcgttgattcccgagagctgttgggcgcacgaaagcaagatggcacccgcgagttgcaggcggtagcgaggggcaaacaccgactccttggtgggcggttcaccagcaatcctaccctcctccgaatcgaccaatttgttcgacaccgccagccacgacagcaccgttccgacatgctgttcaccgtacaggcgggcgatcaccaagcgcgcttcctctcggcggttctgcgtcagcaaccacgctggactttccaccctgagtgaaggtgcaaatagcaagaacaaaactccgaggacgcacgggaacgcagcgccagccgtatccatagctgctttccgcgacgacgaagaagtaaatggacgggagtacgatgccgatggtaaccgaaatctgcagccccagacccaaagtgttgcgcatgtggggaggtgacaactcgttcacatacgcgccaatcgttcccgttgcagtaccggaagccaacccggcgatgaaccgccccgcagcaaatgcccaaatactggataaagtcgcctgagtgagacctccagcgatcatgaagatgcaattgaacagcagaaccttcttacgcccgaacttgtcgctgaagtatctgcagcacagagccccgatcatagcgccgaaaatccacgcgttcacggcgaaagtccactggacttcgagtggccagggaacatgaggcacgtgcctttcgtcaccggacgagcgtcgcactcagacgttgtgttgtaccgcgacaggttcatttgtgaagtagaccatccgctctggaacggttgcagcaacgacaccaggacgctggtgtacaagagagccttgggcttgagttgcaacgcagcagccttagtggtgtcgtcaaaggctcgaacgtggatgttgacgcccttgttgggggtgtcaataccctcaaagtacgccatgtcggttcgattgtgatgctcgggcaccattcgtttggtcttctagacaacagaaacgtttgcgttcgtggcgtagtgctgttgtcttagctgggtaagctgaaagtggaagatcggcaaaattgcacgcttttttcggggtgattgattgattactgcggattactcgggtagatacagatcgtgttgaggctttgaagttgtagcttggagttgaagcggttggatgcaaagccgaaggccgacagaaccaaccattacgattcggtatctacattagcccccccctcccctacttaggtaataaaaacaaacatttacagcaaaacttgacatacataagtactctttggcaaattgacgtgcgtgatgccatcaaacccccagttggtagtacgatagatacgctcaaacggtcaagccggttgaacttacagtttaatcgcccgttagtgagccgtggtaaggaccaccccgtcgatcgtttgatgtacgattccacgtgcgtgcgttcctgctcaccattccgtatcgttgccaatcctaccaaaaaatcattggcctaatttgagaacttttggcgcccccaaattgagcttcaggttcaggtaggccgggcttggcaaacaagcaaacgcggttctctgttgtctactgtactgtttgaatctcctgacatccgcgaatatattctttctggtgggctatgatttccatttcgtagcagttgtatttactataatatacccgaaacttttagtctgatatcgatatcgattccaaggcttcccgaagatctcacccaccggggcgtaagcattttgccagtgacaacaaacggtattaatgccacatggtagcgatgaatattaaaaaaaaaatagcagcctgcagcactgagtgaaattcttgtccaccatatcttgggtatgacaggcaaaaccgtatattggttacgtttctttttgattccggttggcattaagggcggcggctcgccacatcgaccgacgctcaacagattcgacatcttcagtagctagcactgaggatccctagcacgcggtggcgacctaatattggaagcgtgacctttctgatattgccaagaagctcccttttttcatcaaccttcaaagccattgacactctatgaggacttgccagtggtagacttccaacgacggcagcgtctctcgctactcgtaaaaaacatcgttttttttacgagtagcgcgagtaccacaatcttcgtgtttggcattatgcgacaggagctgacgccaacgtacttataaccaatctggtaattggttctgcccgtctgcacaaactttaggttgagtcagaaccttcttacaactcgtttacatatttttctgcgccatatattatcaaatgcaattttgtatacctaccgctattgcagcagagtgaaaacggatcgccatctttctacgagtgtactcacgcttactatcgttggacggctattaccgtcgattgggctatttatgttgtgtagtggtccaaggtatatgtactttattggggcgaagcccccccctataatgaaatcgctctgttttatcgctctgatttgctttctttcgatgaatttatggatacggctagggaatggtttaatggttgcctctcccgggggcaaaaaagcagcaatttacctctgtataagatcctttcaggctcaatgtccgacggtttcgagtgactattcatagaagttcagggacttcgcctccagcaaagggtgcgaatgccattaaactgaggcccgtcttttaagaggcttcttccaaataggtatctatgcgctgtgagcattctaaagtggatttggcttaaaaccgcattattttagctaaatgaatactctgctttgctgaactattgacccttctttagcgtcgtattgcacggatatcggggtaagtgcgcttgttgaaggtctacttagaatagctctgctgcttagctattgctattgcatgccgcaggttgcttgccgtcacctcacgcattcgacacgcctcttccaggaccgcccttggatgcggccacgtcggttggtacactgggagcaggacacacgagcacagagtaagaggcaccggcgacggcgtggatttgggcgggcgcctgacacacgagcgcgctcacgaacgctctgcgtagacccccctccctcccagccatgcgcggcagccgcagcgcctctgactaccgcggctccaccttcggctcagacgccgtgctgttgcagcaagacgcgggctcgtgacgtgctgcaggagctgctacgagagactcactcctctcgccagcaccagagtcgggctgtgtagtctggacgaagcacgtaggaaggccacttgccactgagttgggaaaaccaaaagtgagcgagtccagtagtgttgcatcggggaagcccgcaggcgaaaaccccctttcggtactcagtgactactgcggcttaccttgtaagcagcgaaggaggaccaacggtggtcctgccgttgaagtctcgtactcccacttcataccatgttggatgtcaggcaacatgcacacatgcactgtgccaccggttcgccgcttcgcacagcagcagcattgacacttcttccatctcaacgtcttcctctgctccgacagtctcaaccatctcccaggcttcggccacatcttccacgttcaagcggtctcgctggcgctcgaactcggctggccccaacgccttggtaaacacgtccgcaacattgtcagcacttggcacataaatcacgtccagctctttgtcttggacgtactcgttgacaaagcgagcatgcttcgctgtgccgcactctcgacgtgttgccattgttcgccacgactgcaatcgtgctctggttgtcgcagtagattggtacttccggcccttgttcaccatagcccagccccagcaggagccctcgagcccaaacaaccatcttactgcactcacagcaggcggcaagctcagaactgcaggtatctttagtcacgcgccgttgcatgtgactcttccacatccatgcgttgccgtgcagtcgcagtagatagcccgttaccgatcgacttgtgtctgggcacgattgatgatccgcatcacaaaatgcatccatcaccgggaactcagaagtagctctgtacaccaatcccagacgcttggtcgcaagtgacccgctgtgccgctcgatagttctccaaggtgtacgcactagtgtagcgcccaagagttctcacagcattagccagatcgggacgagtgcagatgaccaaatattacaaggaccccacgatctcacggtacggcaactctgggttgttgatcttgctttcatccctttcgatcttcgtgatcttctcatggtgaaattgcggcgatctcacaggccctcgaagaccctaagccaaacttctcggccagtcgctcaatatatgctgtctgtgacaaagttaacatccgccccggtctgtagtacacctccatgccaagtagatgatgcactcgcccaagttccttcagcttgtagcgcgctgcaagctgcttcacaacttcgtcgatgtcagcaggtactccagcaaggatgatgtcatcgacgtacacagtaagaaagatcactcggccggcacgacgtctccagtacacaccggcatcgtaggtgcactgcataaacccgagttcaatcaaaaccttgtgcagcgtgtcgttccatatcttcgatgcttgcttcagaccataaagtcctttgcgtagccgacagacgcgatcagttccatcttcgtagccctctggctgctctatgtagatgacgacgtcaaccagctccccatttagaaacgcggtgacgaagtcaatgtggcgacactcgaaactgagagacatggagatgagcagcactagccgcacggactcaatgcgaaccacaggtgagtacgtggccaagtagtccaggccatacttccgcaggaatccgcgaatagcaagtcttgccttcaatctctccacatcacctttctcatttcgttttgccaccagtacccacaccaatgtcagtatgttggctcgatgtcgccccttcctcttcttcggacgtgccacgagctcccaggttccattcgccaccagtgcagcatactcttcatccatcgccttactccaacattctgcgtgctcagacgccatggcttcctgccgcgacatcgggttcaggatgttgttcacaactccaatcagcatacactgcaacagggataacgccatcaccctcgtgctggggctgtacttgctgttcggcttacactgccgtccgaattggcgagggccagtcggagacgtgcgccctgcagcacttgttgatgctccagccgtccccgtgcgtgtccaccttcctcgcgggttgccacttgcaccagcgcctccagtagcgctagatccagctgtcgatctcccactggttccagctcgggttgcactgctcggcgcgtttgcatcggtgccggcagttccggctctagtacatgtagtcgcacctcccgcagcgctagcaggtcctgccccactagtagtgcgtgcactcgtagtcgcgctcccactgcctcccgacactgacgagccgctgctcgcacctgagcaagaatgcgtggccgggtttccagcaactcctgcagtcccagaagctcctccgtgatcatcgtcatcgtctccgtgaccatcaccatcgtcatcaaaagcatcaagatactcccagtcattctcctcgctactgctgtcactctcgtcgtcgataccgctgctgggttccagtgccgggcgcttttctttctcttctccagcattctcaactgcatgcaagtcaccaggactctccgtaataacgtccgcaactgccacacgtgtgaccagcatcagcataaacggattctcgtctggcacagatgtggccttcccgtagtactgctttgctatcagacgctccctagtgagcactggtgtagtggggactcaaaggtaccaaggcaaagtcggcagtgactggggtttcgcgccccggagtgacctgtgagagctttattttctatttgcgtgctctaaccgggcatccatttcatattccctactgtgtgtctttggtggttgaggtagtcacccccccagatcgaattgattgactactgtgtgataggactgaattatattttgtattgttccctcattctatgagggtggtgcgcgtaagtgagtgtgcatccagggctggccagtgccttgggtgacggctccgaagttgactggtgtatagaccccccacccaagggtctcaaagaatatgtggtggctgtatattttgtgacgtttagctcggcattgtatttctgtgtgttggttattctgaattacggatctgactgtggtccctttcattcggtctgaccttctgttcattcggtgtggtatatcccaggaacacacccagcagactttattctgtatcgcaacaactcaacccggtgaaatccggtccgccaaaggtaaacgatacctataggggttgacacaaggacacacgccaaacaccggaccgcatcagtgcgattcggtgcgtccaagcggtttcaggcctgggtcattcagtgtcccgtgggctgcttatcgcgtggacaatctctggtactccgaacccgaattcattcggtccggcatagtgcgctatacaccctggacgataaaggcgttcacccgcctcgcctcattgctgccgtgcaattagtcgtcagcgagtagatcaccggaacgaacacacgacttgctgcgtctctcaccatgagaatgacgcactgctcgaacggccttggcactgagcggaacgtcccatcaatgaacatttgcgccccggggtactgacgcagctccaataggcgagggtgtgcccagcccaaaatgcgttgaagctcggagcctttgtagtagacgtgatggtactgacaaaataccagctgagtgtcagtcacgagtgctaggccagggacttcaacagccccgtgaatgttccccccgaaccgagcacggcgaacccggtggacccggccaggacttggtcgcgcgtcaaaccttggattacagtgtttgggtttcgctggtagaactccgtgttcacttcttcgcgccgtgcgaccctggaaagtcaacgcgacccgatctatcttgagctccaattgtcgcatcacatccgttatcggacgaggaacgatgacgttgtcccggcagctatggggcacgaagttgacgtaattcccaagttgaagctcgaaggccacactgcctcggcaacccgttcgccggtagatgctgcagcggtacataatgcggaccctcgtgtactgaaatctgtcaagctggataaccgtacggtgccttggtgtcgtctctttgctggaggagcttgacgaaccttgctcgacatcttcaacatcactgtccgacggatcgcctctggctccgccaacttcaccatggtcaccagcaggattacccccaggtcgatcagcgcgaccgtgaacttcaacttcatatctcggagtacccgcatcggtcgcttcgtcttcttcgacaacgcgtggatccggggttggcctcgcggtcggagttctcgtcgcgtggagtgtcatcgaactttcacagctcttccgcgtagccgttgctgccttcggaggacgtgccgtcgttcatcgctgcgcgagttggaaacgtggagtgtgcttggtctggggcatgatggaaatttgtgaatgagagccgatcctctttgagtctagccggtcgttgtataaaacctgaggagttttgcaacgcaaaggctgggattgtgcacgacgatcagttgaagcagttgtttggttgcagtacctttgaaattgcacatctcatacagctttttgtatgaacatcttggattcgcgcctattataataccggaaacggtcgaacttttcgccattattgcagcttttcatactgctccttcccacgaagtgtccattctcccttttgttgctaacattctagtctcttcacttcaacttgccacagttgtagttattctccgtgaaccaaggtgaatatgctaggcttcaaagcgaattctcattcacggaagtctaatgcagatagccaaccgtatagcgcacaccgccgatgcataacgaataacccacactgcaatagattatgcctatttggcacggtcggcgacacatgtagtatagaaatcgcggtactctgatcatcctactcacctatccaaagcaaattgatacacacgctgtgcttcttacttgccatggagtctatttattcacgtaaaccaaaacgagctccagaaatgatcctgtattgtgctctttcgatagttgaatgagaactaaagcaaccaaacttatcaattttggacatcccataagaacagatttcgttcgctttaggctttaggcatactagcaccacaagcaagaatacaatatacataacaataatcacaggatataacaagtatagaagaattccgagtgggccccttcatagaaatatctcctaaacaaataggttgactttttggtgggtcccctatttggagtcgagacccaaaagaggaccaggcctaccggtgacccatcccgcgctcttccgatggtagcatcaaacctcttcaagcgatcgcatctacgcctaagtcatcacaggtttgcttcaaggctgcacagcggtctctctgcaactctcccgttccttctggaacatgtccaatgtcatatttgctgaaagcagagttccctcatccctctgcaacttctcgttcggcgcttcaaccatcgttaacttgtttaatttctctgtcgttctctacttccaacttctcgtttaatgtttccaattgctgtttcactgttttccgcttccttcgaaatctggtctgcactagtctgcagatccgctaacgactgctccagcgcatcagctcgtgtcttgtgtgcttggtcttgttgatgaagttactccatgtcggattcttttgtcattcatttcttcctgcactcttcacgttgcttttcgctctttgccagcactgcttccgaggtaacttacgtcgcattagcttgagcatccgcatgcccccccccttaagcttcacgtgattctcgcctttcgccttcgcgagccgtcaaatcggccaagcttcctgtgcacgatttaaatcgaggccacgaagcaatctcgcatagtcaagtgtttttgcgcctcttcctaccgcgcaccgttccgcataaaagcttgtattgggggtgggtttggtgtccttgtaggcctggtttactggtgattttggctcggcgaggcggcggcatatgaatattgctatggtactatcccacacaacagacctgcttgcgacaaagatgtgtcctgtgacgcggtgtcgacccctaaattcgggtgaatgcacctgaacctaggaagtcccaatgatgtggagattggtgatactggatgatttggagtctcctataaaaacaagggtaatgtctgcgaatggacgctgaatcccggaagatagatcaatgtgggcgagttgatcccgttccatgaagtgcaacggaatgcgagcgatcatccccagtatatctaagtacggcggaactcaactctggctcacaacctgggagctgaggcacttctcagattccccgttgttttcccggaataacgattcccagacttcgcgttcccagacttacctcccacaaaattccaagaacgacctcggcttgaggcgttccgaggctccaaacccaagaacacttggtttcactatggcatcttccaagatcctaggtgtacccaacaactccgagaaggtatccagtttggcgacccttcaaggccagaccactccgcagaaagatcgcagtctccgaagagtcgctaaggaaagattttgtctgcatgtgacctttaaccaaacagagttcgttttgcttcgaagggcacaagtgcttctttcacagcctggaaggccgttctccacgacaaaattcaaagtactttaggtaagtgatccactgcttcggcctggaggtgatcatatctattccatatctgtatatttggcggattgcagaccgtctttgttgtatatttgcggtctattgggcctgtgtcgaactgaagaagttggcgacagggtagatcgtttcctctctccgagaggtggtgcgcgtccccaagattgatcaagtgtcttggatttggaccagttgacttgtattttggccttagccttgggcctagagaaagaagagagggcaaaggagtatttgtgtgattgtataacgtgtataactctatttgggttggattgttctagcgttagcccggcgtagctgtctgattcacggggtcgatactaacctcctggtgaaaagaaccgctacccaagggatacacatcgtgcgcctgaccaacagcgtgtactggacaacacacaccctgtgccagccgagacggatccaaagctctggtagcctgaggtctgtcaaggagggcctataactgttttctgggagaaaacaccgcatcgcctcgtcacagccctctctattaagtagagaaagtgcagtctattcataagacgtttaaatgtattgtggtttgcatacgttttggcacttcggtctgaaactcgtacgacttatcgagcacgacttatctataaatcgtactcgagtacgaattgctataagtcgtggatggtcaatgagcactaagtagtgcacaaacaccatctcctgcatgatttagcccatccagcatggattagcatccgtttgacgctttcgaaagtgccaattccgagccaaatcgggctcgaagcacgcctttagcaacttgcattcaaagcctccatgatttaccactaagtacgaacactaactaatgcactaactaggagggtgcactggatgcaaagcacaataggctcaaactctacatcgtttcactgggcgatgtgtgcacttaccatgccgaaaagtcacattcgctcaaagaacacagttgcgcctgtaaacatgttttacaggtggcgtcctgattaatattgcgtaagaaacgcgaaacgcttggaatcatcattagcttttcccgaaccacttccaccatgaagactatcctttttgttgggatcaacaagaggaatacaacaaacgaagcatgtgcagtcatgaaatattcgcagatttcggcacattttcgctcgatgtttaaagcaaaaggggtctttagtagggccattgtgctgggtcgtgctcctccgaacaagaatggttgataacccaacaaatccggcaaagcattattttctcgcgcagaaaaggctttagtgagtcgtagatagttgcgtcgtccaactgattggccctcgcgtacgaagcttgagatgctacgccactttggcaacgctgaagcattcgctgggattcaccactttggccgccaaagcccggcgattcttgttcagtttcacggctgttgtggctacaaatgtcccgtagactacttctcggtcccaccaaagtatgatgcatgttttttgggacatagtttagactacactcagaagtataaaaaagtagacccgcattcgaatccttattagctggttgttttgctggtatttttagagttccataacgtgagttgtcaagcaaataacagcaaaatcatcacacccattactaaggtaccaagggttttgttcccgtagttttactcctatttagtgatattcatcgtgagttttacggcggctttgcatgaatttggggatcttccagcccggaaaagatccaatgaaatagtgccgtacactgcgttttggaccccttataaagtgaggttttacttcaggttaaggtaacatgcgaaatatcagggaatcgttttagccaatagaatttctgtacggttttgctttcggaattactcatcccatcctccaaaacaaacaatcgctttattgatttagacccgttcttatttccccagtctcacgtcccgggacgtcattctgtattactattggctgatggtttagtgcataagagtggacaccgtcccaaaatcgtcccgctcccaagtttttttcgcgctatgggagctgggacggttggtgtgcacagtgcactccggcaagcaaggcgacaaagatggaggagcttgaccgcattgagcgggcaatggaagagaacatggggtggggcaccaaagcgctacggagcgagtgcaggcgactgaaagctacgcccacggcccaaaataaggccaactacctggttgctttacgcgccagcctcgttgtggcaggcacgatcgaggatacgggcgtcgtgcaggaccccttcctcggagccgatgttctgcggaaggcagttgtggagtagcgccctcgcagaaatctcgcgaatgcgatctcgcacaaactcggcgcgtctggatagcggtcgcgccgagcaaattattcccggttgttggagtagcgtatcttcgaaatacagacccaagtcttcgcaggcttcggagttggggggttcttgtgttggcgcttgttccttgtcgtagggcgtcgagccttgggcgtgcggcgttatcgggcctacacggggggtcttgtgcacggcggttatcaggccagtgcggtccttagcctaggcagcgcgttatcgggcgcccacctaaacggtatacgtttaacgtgcctttgttccagcacgggtctgtggggggtgagcacccgaaccagcaaacgacggggggccgcgatatcgaggcggctctacttgccggcgtttggtggttcccctggaacctcggagaagacgggaggtctttgtggttcagagaaatttcgggactgagtccttaccctatcctatgccctagctactggctactccgtactactgcttgctaagcctatcgttctgtgcctatccctacttctgtcgtgcttgcactgccgtccttcaacctgatttgcgtggcgtaatcaagatcttacctcgacgcgttttggtcgtcgcgttttgctcggcgcgtcttgctcggcgggttttgctcggtggggattagggtcgacgcgttttgcagagacgaggcgctggtcgactcgtcggatgattacgtcgagttggactctgtcgctgtgtctcgcggcccatcacccgcgtcgactttccgtcgacctctgccgcgcgtcgcccccatcaatcgcgtcgcgtttcatcaactgcgtcgagttcatcatccgcatccatcagcattcgtctcggcgccttctttcaccgacgccgacgtgcccgcttcactacaccacacccgtcccgctgccacacacgcgcactccccaggtgggtgtgtcgttgcagaacctgccccgcgtgttggccgcatctcgattcgtcgaattctttgtcgtctccgtccgcttcgctgccattcaagcatcatggttcgcgctgaggacttctgcgtcgaggagagcgggcccgacacgggcaacctcgaggctgcgctgacatcgtcgtctatgcaagcagagcacatcggtgtcgcctccctgatccgtccgatcagctcgcggtagcccaagctgcctccccccccggtccaatcgcgactcggcgctaccgtggcggaatgcgatcaagcgcagcaatccttcgtagctgcagagcagcagcgcggcgtagcttttgccgagcgagaccgcgcgcatcaagccctggcggtcgtcgagcaagcacacgacgcttccagcatcgcgagggaccaagtgcgtcaagcttcggctctccaaaaaggagtgcaacaccgccgtcaccgagagagaccaggtccgtcgcgctcggacggcgacacactacccttgttgggcatctcgcccttatacgtaatgcgcccacgcagagccgtgcggaagccgagtcggcgcagcgtttaacgagccgctgttagtagaccttcggcacaataacgcgttccttgtgacccacgccaaagaactccggcggagcgcgaccgacgcgtatccgcgacttggaggaatcggcgagtttcaggccacgtctcgcgcagctgggaatacgtcgcgtgtgggggtagcggcgagatgccgcaagcgctcaagtccaccgttccagcgctcacgtaatcgagctggaggacgagcacgacgtggccatccaggaccgcgacgagcatgacgcggtttgaggacgggtgcttcgggaagcgcgtcgaggttggtagatggcgtagcacgtgcgcgatggacttccagaacgtcttgccggtgtcgtcacgtccgtagccgggcacattgacacctacgacctgatccgtcgacgtgaagcttccgtcgcggtggagataaacgctgtggcctgcggagtcaagccgagcggcggctcccgctgctcctgtctcgcctccactacgtcgagtacgggtgtcagtatgcgttctgccgcccccgtttccggtgctgaggctaagacctcgttaaccgcggatactcatcgggctccgacgcaccgtccaggtccgacgcttcgtccaggtccggcgtctactccgccgccagcttcagtgggtgtccgccgcccgcggtacagcggagccgaggaatcaacgcgtcacgggtgcaggcctcccagtttggtctcgacatcatcgtctttgccttcgtctcggctgctgctgtcgaccgaacgcgccaggtcacagcgcagtttcagtccgagccttggacagcgacgcctaagcgtgccgccctcagaccaagtggcgacgtccctcttcgcgttcactgacatggaccccattgaggggccctagtgcctcacgttgtcgttgctcgtagtcgctgtagccgtaactccaccacgtaggccttgctcttttccttcgtttctttccacttcttcacatcttttatgagacggccctccgccatctcatcttcagcaacaggttggtcctccacactttcctcatccaacccctcgctccggccattcccagagtcgaggctctccgcctatccacctgtcggcagccaccctgccaacttccaccgcgccactgaaggcgctcacccaccagggctcagctcagccgccccacgtcctcgcgcgaaatcgccgcaagacggtaacgaccagcatgctgtcgcgagaagtcgcaccgccactttccgcagttgagatccagttcgtcggtacaccctctccaggtcacgtcggactcgcggcgcgcgcagccaggtcgggaagcccgaccggcatgcagctccaaggacttctccccttcggaagcatcctcgtccagagcgagtgtcaggctgtgctccagtaaacacgtatcggtggagtcaaacggtccgttcgttgacaccgccaaacacgtcgcggcgtgtgacggaaactctttaacggggttttgcttggaggtgcggaagtcgaaagacagttggtaaagcgagttactcgtctcgcgacgcgactcgtttggtctgccttgcgctttggtgcacaacctgacgcgccgcatctgcgcatgccgtccgatctgtagcgtccgtcgcttgggctcggcgcactggtgcggtagttttccgacggcgattatcgcccttgacgtacaccgcggttctcggtcgcgcgcgaacctaaaggagagcgccaagtctaccacaacgcgaaccctctcggcgtgcttgaccctgaccttcgagtacgcaacgccgtcgctctttacagtgctagtgtcccggctcacttctagcggcatctcgtcgcggcagtcggcgggctcgttcgacggggtcgtcccattgatcatagcgcgcacaggccaacaacttggaaacgtccttgaccgaaaattgacaaggcgtgcagcccgtctcaagacgtgctcacacacggggcgtctcgcggcacagcgtcgagcatgagctctagcccgtaggcagatcccattctgccgcgatcccagcaatatgacatcaacgaattcactccagccctgttcatcgccgcgacgtcgccccgggtccgatctgcgtcgaccccggcttggccgactactagcacgttcacctgcgcgagtcggcagttctgaaggatgcatatccctcggcgcgtcgactctgttccgtcgcgcgacgagtcactcgcggcgtccgacacgctcctcgcaacctcgaattcccaatcagcctcgacgcaaggtgggtttctgtttatcgcgtcgtcgcactctgagggctgtactgacgttggaccctccacgtatttcgacactgcaacaggcctcctgatcgggctcgacgcgttcctcgttgcagcaggctcgttgccggccgcctgcgtcctagccgcgtcgaggccactgtccatcgccccgcgtctcgcctccgcgtgactgtccatcgcgcaatgtagaacttctggcatcctcgtcgcgctcaggctccacgcgttccgcgctgcaccgggctggatgccacccccctgcgctctcgccgcgtcgggggcacttcccatcgccccgcgtctcgcttcagcgtgactgtccgtcgcacgacattgaccgtgtttcgtggcatctggtttcctgacgatctccactcggtggtgtagcgtctctgcgcaccgggtctgcgacgagtttcccgtcgcgttgcactcatgacgttgtagctcgcatcctaccagtgcgtcggacatgcgcttaaggtcgtgggggagaccgggactgtcgcaatccaagcaatatcgtatcggcaaattgacttcagccgtgtccgtcgtcgcgactccgccccgagcccgatctgcgacgtgttcagcttggttgacttctagcgcgttcacctgcgcgagtcggcggtgctgtcgaacgcatagccctaggcgctttgactgggcaccgtcgcttgacgtgtttctcgttgcgacccacacgccacccaaaaacttgaatgcacaaccagatccgacgcaagacgcgtcttcgtccagcgcaccgcgccccgtaaaatgcccggggccatgccctctgcgcctttagctgctctgggaggggtcttgaccagactcgacgggttctgagcagccagctcttgtaggacacctggagctctgcctctggggttcgttgcgcgtgtagaagccgagtgcatcgtcaccacgaggacgtacgccgtcccgcgccccaaatccatgttctccggcgtcggcggctctcgttccggcacgttgacgacagggttggcctcgtcgcagtttccctcgtcgcgatttttcgcgtcgcaatcttccgcgacgaggttgacaggtgacgctgtttctggatctaacgtccggggtcggatgtcttctcgcgagtgatccgccggctgtatgacaaacacccctgcccctgctgcgtcaccgtcgctcgtcccgcgtctcgcgtcagcgcgactgtccgtcgtgcaacgtgggtctggcaccctcgtcgcgctcgggctcgatgcgttctgcgctgtagtaggctggatgacccccacctgagtcttcgccgagtcggcaccgtccttcgccctgtgcatcgcgccagtgcaaccggccgcagcggagcgttgaccgcattccccaggatccgattccccggtgacctctcggcggtgcatcgtctccgcgcaccggatctgcgacgagttattcgtcgtgctgtcttcttgatctcgtcgtacgcatccaacacgtgcgtcgggccccgtgttcccgcctcgacgtacgccgtaacgcggttgtacgtgtagtgcgtcacaggttcgaagtcggtgtagcttcaggctgcgtggctcgtcgcccgctttgcccgccatcttcaggaccgcagacttattgagttcactggacatccgtcgagtgacagctggtaccttcgccagcaatcctccaggtggtgcgccgtggcattcgggcttgtcaacaggaaatcgcaccactcgccccgccgcggcgtacccgccgcttcgatagatcgcgcaattcggaccagcatcttgctcagggttgaccaatcgatctaggtttatggcgcggtgcctctcttttggcgcagaccccggtggtcctccagtcccgccaccgtcaggcccctcgtcgaccacgtcgaagttcacattcggcttgttcttcacgggctcgagggcggaatgtcgccaaagacgccattttccagctttgtccccaagtcgcataccgtcgcaggtctgagatctcgctaatgaccgtcgcatagtgtcacattcggtcagtctcacgtcgtcgcgtcccctcgacccttcgctcgactgtcgcacgatgtcacattccgtccgtctcatgggcgacccttcgtccaactgtcccacggtgtcacattcggtccgtctcacggtgtcgcacttctgggacggcttctgggacggttccgagacgttccatccctcacatctcacactgtcgcacttgtccctgttggattttgcaacttgcgcgcgttcgctcgactgtcgcaccctgtcgcattgctgcgaccttccgcgcctcgcgcttcgtcgcccgacgcaccttcgacgggttgttcgactcgcgacgcttcagctgggcgccccgcattgtcgcttctctgcgacccgtggtccgaccgtacacacgtcgttactaagtcgacttgtgtcttcaacaccacgcgcgacagcgtcgagtggccacgcgtctgcaacttgctcaccgacgacgtctccaccgctggcgcacgggtcagccccactgttggtgacttcacagcgactacagggtacgatgtgggcttgctatccgcgtgaacttcttcctctagctcacctcgacgcgcgtcgaattccagatcgtcgtacgtcggccatccatcatacatgggccagacgagctcgtcgtcacgccaggtctcgtcctcgtcgcaggtcacttcatacgcaaggttttgccaatcttggtactgtcgattagtcgccaaaacgaagcggggcgcaggcggaaacacatcggagggtgtccaccaacccacgttcgtgcctgcgtcgagcgttattgtctcgtccgtgacgttggtcacccgcaggtatgtttgtcgctcgatcttagtcttaaacatggttgtaacccacgttttgctgcgcgtgacccacaggcgcggtgcatctcggctggagcgcaggcggacgtcgagtgtttgccctgggtcgagttgcttaagtgcgtcgagtgagaccggccgcactcgtgcgtcgtaacgcgattgctcgggagtcgtagaggcccgcgccatgcccaacggtcgcctggatgtcgtcgcaaccggcactgcgacggacatcacggtgtgattaccaagtccttgctggcgcatctccttcgacgcgtcccgcgtcgacattttctgcgtcgagttttttcgcgtcgagattcttggctcgacatgaaccgcagagacatgggtattcgacgcctgagttatcgtagagcgcgtactcgcctcttcctcttccagcaccttaggaattgcttccttcagatccggcagaaccttgatacgcgctggcgtgacctcacggggcgtagcgcgcggcggctcgctgagatggttgaaaacctcgtccagttccggtgaagtcgtggttgaggtcgcggccgtggttttcggcatcccgaagtccacgtcaaacaagtcggcgggttcgtcatctacgtcgcgtcggggtttggacctcgacgtggaatgcacgctcgactccgcctgggacgaagttatcatctgcgttgagattgggcgcgtcccaggcggagtcaccttgcgttggatggatccgaccaggaccgtcaacggtcccaagacgccgcggatcgtacgtgtccacgactcgacgccccagtcatacactcccgtcctctcggtgatgcccaagctgaagcctgattcgtgcaacatctcgaggagtgtccctgcggctcgcgtgacgttcgtgagcatgtcaaagtccggcacccggaaaggacccgtgaacttgatcgcgttgggcttgatgaaacgcaggctcgaatcgtgctccagcagccggatcagctccactccagcaagcatatacctcatctctgccgcggtgaactgattccccgtgtcatcgcctctcgccttgacgggcggtccatccgctgaatccggcgcgcagagcttctccggagacttgcgcttgtgcgactctaagctgctattgaagtccacactcgattggtatcgaggtggcggcgagggcgtggtcgtcgaggtctgggctgagcccgctgagaaactcgtcgcgtcttgtttgacggacccggcgagaatcgtcaagagctcctgcacgacgcgaatcgcgcgcaaccaggacttgaggtcccagtcgcacagcttctccatctcgaaagatcccagcacgaatcccgaatcacgcagcatctggaagagaatcggcgcggcgtgggcgacgctggtgagactatcgaagtccggcgcgacgaatgggcccgtgaagttgctcatcagcttgggcttgaggaagaccaagatcgggtcttgctccagcagccggaagagctcagtgcgcgccacgacgtaccgcacctcttcgacggtgtactggcgccccgcgtccttgccttgcggcttggacagcgacgcttccgccgagtccggcgcgcgcagcttcttcttcttattcctcttgtgcgacttgcgcttcgtggctgggttgttgttgatcgtcggcctttgcaggcttccgaccggtagggccgcgacgcaagtcgcggcccttcgcggctccctcgtcgggagccacatcgggaacggcaaactgttcttcgtagccctcctggtcgtcgctggccccgtggcctgtcgtgatggttccctcagagctccacgacgcgacaggtctctcactgtgctctcttgcggtcggcgaccttccagccgactgcgcacctgcctccgatgcctcttggatcgttagcccgtcattcgaagtagtacttccgggccgcggcaccattgtggagtagcgccctcgcagaaatctcgcgaatgcgatctcgcacaaactcggcgcgtctggatagcggtcgcgccgagcaaattattcccggttgttggagtagcgtatcttcgaaatacagacccaagtcttcgcaggcttcggagttggggggttcttgtgttggcgcttgttccttgtcgtagggcgtcgagccttgggcgtgcggcgttatcgggccggcgttcccgtcgggcgtgcggcgttatcgggctggcgtttcctcggcgttcccgtcgggcgtgcggcgttatcgggcctacacggggggtcttgtgcacggcggttatcaggccagtgcggtccttagcctaggcagcgcgttatcgggcgcccacctaaacggtatacgtttaacgtgcctttgttccagcacgggtctgtggggggtgagcacccgaaccagcaaacgacggggggccgcgatatcgaggcggctctacttgccggcgtttggtggttcccctggaacctcggagaagacgggaggtctttgtggttcagagaaatttcgggactgagtccttaccctatcctatgccctagctactggctactccgtactactgcttgctaagcctatcgttctgtgcctatccctacttctgtcgtgcttgcactgccgtccttcaacctgatttgcgtggcgtaatcaagatcttacctcgacgcgttttggtcgtcgcgttttgctcggcgcgtcttgctcggcgggttttgctcggtggggattagggtcgacgcgttttgcagagacgaggcgctggtcgactcgtcggatgattacgtcgagttggactctgtcgctgtgtctcgcggcccatcacccgcgtcgactttccgtcgacctctgccgcgcgtcgcccccatcaatcgcgtcgcgtttcatcaactgcgtcgagttcatcatccgcatccatcaccattcgtctcggcgccttctttcaccgacgccgacgtgcccgcttcctcgctgggcactacaccacacagtggcatgtgtctttaggctgctgaatgtcctcttctcggatgtcttctgcgcgggggttgctactctgggggacgtagcgacttgacacgcacacgttgggtagcgcatcaccctggtggacaaagattacggcggcctacaacgatgaagacaatgaaacttttaacgctttatttcatacaaggcctacgttttctaccatcgaccccgcggcgttcaggcaccacgacagcaagaagctgtggaccatttgaagggaggcatgaagccgatggaagatttacaacttccggaaaccaagcccccttcacggccttcatggaggtaggatggacatgtactacctccacctactgactacaattatgcggccaaacctacacgcctgcattattcagacactgccggaggatttaatggctgactagataggctccagatccgcgcggaaacctgcaaaaccgaccccaactaaaatcggtaacttttttttaaaagaattgtacaaaatgattcttagttaactgtgtcgtaatgtgataataaccccttgtaggctctcgcacggacaaagttgttgacgttcttaaggactttgctaataatcaagacaaggctgtgctgacaaagcgccaaattagtttttttgaagaaagcatcatgttgaagagccaaaagaacgatcgctgcgacgatgcgtgctgcagcgattcaccagaagagggacacggtggagctactggttacgctgcagaaaaacctgcgcgagatgcgacgggagcttgcgcttctagcgttacaagaacttacggctgaagcctcggagtttgcggacctgaaaagctgtattgcaaagttgaaaagcgagatggaatcgtgcttgagctaacagcattgtaatacacgttgcatggctaatggtaatgcaaaactgaaaactgaatttgccattaatattagtgcgagagtacgtgatgctgtaattacttttaagtagagactgaattacacgacaacccttagtcacatccattctatctgccgcgctgtatggtgttagcatagtttatgtaggtatatatgcattgtctcccactagatagtcgccaagcggaagcttattacacacacgatgcaaggacaaaagctgaaaagctcgaatatcatatgtaccgccagggtatttaatgaaaaaagatgtaaaacgagagaggtgatcacatgaagcctgtacgttaacgccgtaacagtgatagtggccagaaaattggatataacatgggcggtttcacgtttgccgagcgttttaatacgacacagccaaccgtcatcggcaccgatacaatcccttagcacacatgcacactaatcgacgcaaatgaattgcattgatctttcatcactggttccgataaaggaaagtttatatccaattcttcacatgcaagtaatacactcataccacaattcacataacaaaaaaaatgttgggacactcattgatgctatggcagaaatgtcctcaaagcaccctcctgccagccatcgtagcgtgcaatgcaagacaacttcaacacgaacgatagagtatggaaggtaaacacgtagaacaggtactaagaacccacaaaattgttgaaatgcatcataacgcattctataacgacgctggaagcgtcctgcatgagtaggtacctccaagtgaacgtatcccacccaaaccgtggaccgctgtgcttctcactgcgctcattcaacgtattcatatacaccaacacccattcacctaccaattctgtctcctcgtctgcaatgtaacgctttccatggctacctgtagtgccattgtttccttcaatcattattttatgaatgaaacacttggcggcaaagcactagcggtggcgccaaattcactggcgctcacatgcctgtaaattattattaattataggaggttatataataattaaacgtttatgtggctgacataaatatcccaagttttggttcttatgttgggactttggaacgaattcccgccgggactcgccccgggaacataagaacgggccttagaatccgcgacgtgagagctttgtagccattttcaactacgaatctgttttggctgaaatcaacgaagaatttctcgcactgattaacgcgggaactaaagctgaacaacacatcgcagattatatgcggtcaattcacccgactagatggtcgatatttgggaaccgcacgcttggcgataatgataaggcgtacaccgagcgaggttggggtgagttcccagcgtacggatcccctaagccgttgttaagagttcggactactagtgtcatagagggagaaaacaatgcgttgttgtggaacaatcttcgtaactctctggtgccagaaggattctaccgcttttgcttgagggtcatgtctgttgtcgcatctaacaccgccaatgcctgcgaatggctaaccgctagccatgatgtgactacaagggcggtatgtgcgttccgagaaaaactgcatctagctgcgacccatgaggtatgcaaatggacccctgcaaaatattctgtgtctcagcgttttatttcgaaaggtactgaaccttgcaaacctcaaaagatttagcgttgacatcgatttactggagtgcgaggggtgcagtacccgcgtccacaaacttattccgtgcgcgcacctgattgttgcgatttacactcgaaacaagcaagataacaactttagcatccattccgcactaaaagatgctttccatcaagcgtacattaccccgagctacaatgccgcgtttagtgatgttggcatcagtattcatacagacaccgagctcacccgcgaatccctcattcgttcccctccacgctatcgccaagctggaggttccttgggctcagtggcacatcttggccaggatcgcttgagagctgaaaaacagatcaaaagtcgaggggagctacctacaggtctaggtagcgtttcctcccccaccacgtacgactctgcgacgagcgatttaattgccgtcatgagcgaagccatatctggagtgataatgaagaaacgcagcaagtacaaatgcagtacatgcaagaaaacaggtcacaacaaacgtcggtttgtgaacgaaacagagagaccgaacatgcagaggagtaaaacctgggagctacgtagtgaacaaaatcactaatcaatttatagacatgctctcatataaatcgcagtcctctttgcactttatttcaccgcgctagtgcacgcaactcttcctcggccacacgtttgttgatcgctggtcagacgccatcaacaaaaagaaccgattgcgccttttgttaatggcgccatctactaattatgcatccactggaaggaccttgcgtactttacagtctacaacatatatactgttcggtagtaagtgtcattgatacagagatacggcaaaggagcactagataaatatttctaagccaggaggcgcaaatgcgggaatcccgttatctgtcgtcaaaacggtacttcacgattgtttttgtgttcgtgtacccgccccagaaaagggctcaatgtattggcagaaacgtttgtctttttgtctcaggtaacctaagaaaacgtaagacccacctgataccaattgctctagaattaatcaagcgaattacgagttggacgcctaaatgaagcctactttgcatccaagtagtagtgttggtccctcaacctctgcgcacaggagcgaggagttttcttaatcgccttagcatttgcgtcccttatcatgcctcttcggagcttccatcaccattcgataggtcacaccgccttttagacgaagatgattttcgttcagaccgcttttacttttgaattcctgtatatgaagtttgaacggtggaaatagacgtcgctggggagcgttctcttgcttggtcagcaacccccggaatctcatttggtgacgacgcagaatcttcttcggaatgtatatcaatagaaacgtacaggcagcttcagcatcattgcttgtgttagacttcgacacgctcatatgatcaccctcagggcagcatcggtaccaccgcaaccgtttttgcccgagcccgaatcgaccctttcaaaagtacttgtatccgcaatacgtccaatccccaggaaatttgacggcgttgctcggtaggttctcattgcgtcaaatatctcttggaacttctcactttttccattgcatcgtcggtgaaggattgaagagcggcatgatgttcctcaacagcagcaagcgcagatacgactgcatctctagcttcctcattctcaagttggatacgagatgctgccatgcatccaccgatttcgcgaataacttcaacaacatacccggaagcaccacgttcgttaagtttgatacacgaactgccatacagtcgacatcagcagcacattacagtgtcaccgtctccgcatcgccgtcccgaacagcttcagccataggtgtaagttctgcaataaatgctgtgctgataacatccttacacaacgactcctctgtaatcttatcgcattccactcctagtgcaatcctattatacgtagcaaccggtaaattgaccgtattatccactagagctgactcatcactcaacttggtaggcgtttctacaccacgaccgcgcttagcgtagttcctccgatcctttcttccgtctatcacgccgctaggagctccgccgattgggaagtcttcgtcacggttgttgcgaatgagttcgtcacgttctactcatctagcgcttccccgcgtcggcgcaaacctttacccgtacgatccgtcagccccagttttgctctcgtatttgcccaatcatccaaatgacatttatcaagaactttgctcgccaaaggctatggcgttcccttgctttttactgaaaagcggagtcaaatcaccacccctacttttcaaacggagcgttaagccccccttagtttgcttaataatcataacgcaatagcaaagctaatagtttttgaggttatttagccaaaagacagaaggacgtgtagccaaaattaccacattctatagatcgaacattttgaattaccacaattcaaaatgttcgatctatggaatgtattgagaaagccccttaaatgctgaaaattgttttatactccgtccattaaaatcgggctacttagaacacatacttacacgtatattctaccaaaacattttcggagaggggagcactgtcagattctttgactgccagaaaattctttgggagaatttgcctccgcaccagcggagtccgaagaccgcgctgatcagtgatgttataacaccaccactcatgtttgctaacgctatgtgtctatgctgaggtgatacgtgtgaacagacgagggctgacacgagcgaagacctcagcggacagcaacgcggctctgttactacagacacttgccaaccgtgaagaagcgggcgagtactccaataccgcgagttgttcaacgtcgcgacaaaagaatagttacgcggttccccgtcgaggccaacaacagctacggtgtcgcactctatggtgttgcctgactagtgctggctatggccagatcgagaacaacagcaacttcgaggtgtccaagggcgcagacgccgaagcccagtttgtcccgactacgatgagaagttgacacgatgcggctccagatttcagcccgagccccacattgacggcctggttctagctggatccaggatccaagtggcgggaatagcctggatatgcactcagcgccctgaatcaggatgatcaaggtgcatccaggctgggccaagtccgaagatcctgaagcctaccagcccggaagttccccagccaagttcgagccagtcatgccgcaagagccgaagagatgcccgaccaagctcgtcgacatccaagccgcctgaccgaagcccgtgtatcctgaatcgacaacgtgtatccctaatggacgactctccaagctccaagatctgaccatacaaacccaagacattaacgaccgaccaagccgaccgaccaagatctgctcggcacatggaaccttggactccctcccagttgtgctgccgatccccgttggatcttgcgactcgatcaatgacaacccatattaaaaccaagataaaacttccaagactgcatgttacgattagtgatagcctacaaagataagaccagagttcgttttcctgagtacagcgcaagtgtcttcggttgggggccaggcaattcagagctggttcagactcaaaggagccttgtgtcttcggttctttccctgcattcagggcacctcggctaacagcgtaagggtcgtgtgtggagctcccatagtaaatatcagaccaagttaaggcgagtacctgagttgtcgcacgaccagggttgataagctttatttcatattctagttggggtgtttgtcctgtacagcactgccatttcatattaagctactcctagggcggttgaggtagtcaccacctagtgatttgtcgataggctactgagtgataggaaggactgtgttttgtattgattcggcgtttccctcttgattgagggtggtgcgcgactgattgagggtcttggacttgccagtgtcctggatctaccctctttgttgactggtgtgtagggcccaccgtccaagggccaaccaaaggtaaagtggcggttgtgtgtattgtatatttgtgtatagctctgtattgttaaggttatctctccggatccaggctgtggaagctgcgttctgaagtgtgcgttggctctgcttcctggtcctagcgatattatcctgtttcccgcaactcaccaagtgcaagtctcacgttcgaagacaaacgacacccaaagggattccacaagaaacacgcaccacccgggacgacacctagtgctcgtccagggttgttttgagaggacaagtctagatctttttcgggccactgttcacctgggcggcaaaaggcgttcacacgcctcgcctcagctggtgcgcgtgcccggattcgaatcgtttgggacttcacagagttgtggttacataaattgttaggattgaggttgcgaagtctactaactctctgaccgaagcgtttatggcgagaggaagcggagaagacatgcgcgaggaaagacgcgatagcgagggacgcgttgatgcgtcgcgccagtcgcgtaggtctcaggggctgccgccggaggagcacgcgagcctggacgaggttgtccgggctgctcggaaggcaggtgcagcaaagcgcaaggcgacccgcgaggcgaaggccaagtcatcggagaaggagccgactccagtaccgtcagtccaggatgacgcgcaccaagtgtccccggatacgtccaggatcctgacgcgaagactgtccaagatcagggtgagtccgtccaggatgagcccgccaatgaggttgatcccccggcggcggatcgagtttcggactctccgctgccggatcaagatgcggagtccaaggaggccccgaacctggaagacaagccgctgccgactgtccaagaagtggacgagctcgaggactcgcaagagacctcgccgtccgcccaagcgaccacgacgaaccctgaatcctcggtccagaaagcttcgaccaagacgaccccaaatcaagtcatcccgggccaagctccgaatccaggctcgcttcggtcgggaacccctgaccagaggttcgccgaggtccaggagaaggcgtacgttgcgcagcaagtgtccaggtgggagcgggtggagtccgagcgcgtgatcccgcccactgtagagtactcctggccgacagccaagccggatgcacagccctggatggccgccatgttgaccacgtccaggtacctcagtgcgcgagcactcttggaggaccagtatggatgctggatcgcgaaacttcgtctcgaccgtcgggacttgagcactgcccaggatcttatggctgtccaggttccggtccagatgctgacaccgcgggagtgcatggccatcctgcaagcctgcttttggaggctgaattcaggtttgacaatctggttccggtctggttcaggacgagagcggccaaggtcgccccagccaagctgcgagtggtcatccaggacgtaccgcatccgctggccctggaactggtggagtggcgttcacttgctgtcggtgctacgttcaagatcatccctgtcctgaaagcgcaagcatcagagactcctgaatctgaacaagcatccatccaggattaccacgctgaagatcaagacggagatctattgatgacggattacgatctaggcctactcgtccgggaatacgttctccgcctcaagctgactggtcttcgcccgacgaggagtccaggagggtcgtccgatggcgagcctaaaccgaagcgccaacaacaccatccagcccggccaccgcttgcgtcgctgccgtccgcgtcgagcccgtctgaattgccgtcgcccaggacctccagtcggagtgatgtcgtccaggcggaggaggccgccccgatccaggagtatgcgacttcggacctgtcccgagcttggtcggtacttctggatccccggaagcctccctgtacggaacgatgtctggatccaacccatccaggaccagctccgcgagttcgccctcgatcggacttggattcagcgctggcgcccacatgccgccctcgacgtacggtccgatggctatgtcgattcaggctggccgtcctggatttgcggtcggtggaggcgcggtgggttactacgtgacccagcgtgtcgtgtcgaagcgcgccgaccaggatgatgtcgagatggccgagtccgttcagacctccaagtctcggacggacagatccaggaccaagtcctcgtccagacaccgccggcaccgctatgagtctgaattaggctcggagtcgtccagcgagtcggagaccagcagcaccaggagccgttgtcaccgacgttcctcgaagcggtcctcgaagtcgaagcggaggtcttcgtccaggcggtccagccggccaggacgctcgagacactcacacggatccaggaggtccagtcggtcgtacatgtcgatctcgtctggggtggccgaagttgcggtcaccacgatgaacgacgcgaagcgccttcagtctgccctggatcgcatgaatggctcgagacatctcgacgcagctgaatcagttgcagatgagcttcgagtagaaggtacggtctgaccatcgttctttgcttgattgtgacaagttgctgacgaaagattcgtgggtaccggactcaggatgcggattcggcctgaccagtgatgagtccaagctcgtagagaaacgacctgactctggatacatgtttactttggcacaagggtctaaacatacgaatacacacgttggaacgattaaactgtattttcgtggcccacatggggtctgatcgtttctttttgagaacatagcacttgtaccgcatgcaaagttcaacattctgagtgaatattggcttaagagggtagggtaccaaattttgggatctcagactggagagtacaatttgtactttatgaaaacagtttagtgtttgtagctcgtgcaatcaattgagcatactatttacaacccaaaacagtgaaagacaggcagttgctgtgcaacgctgtcaaacaaaggccttgcaagcctctagtcttacctgggaccggtaggctagagagcgcactgcaggagtggcatgtaaaacttgggcacatcaataaagagcagcttattgccatgttcagcaagaagttgatagccgggatgcctacactaccagcatctgagctgcgcaaaatccccttcttctgtgctacatgcgcagagatgaagaagaggaggatgtcatatcgtaacaccacaggatccagagacactcagccgatcagtacgatacacatggatacaaatggccccatgaaaaccatgggagtgtatgggagcataggaacgaatccgtacttcctgagcatcatcgacgacaacacatcatggcgctggacatacgccctacgcacaaagaaaagaagtgtttgagaaagtgaaagggctgttactacagctggaacgtgacggaaagtttaagatccataggattcggtctgatgggggcactgaatttgtcaattctgcctttaaaagtttcagtaaaggcatggggattgtctttcagacatccaattcctacagcctcgaagagaatggagctgcagagatggatcatcagagcaaactcgaccgagtgcgctgtgcattgaaagatgcggatatggcccaccgatggtggcctgaggcactgatgtacacaaaacgccgcacgagatggtgcacggaacaccaccgaacgtgaggtagctatcagtctggggatcagtgtgctttgcccacatcccgacagcgctgagaaaggacaagaaactaccagctaaagcactaaagtgccggtttcgtggcatgtcagaaagacacaaagggctaccgcttgtgggacatctacaacgacaagcacattctatcaagagatgtccaccaatgcagctactatagttcagcgggctgtcggcaagaccgagcctgctgtcacttctgaatctgctgcgcgagagttacccgcagcagtgggagtggcaactcctgccagagtctaccgaggcagcgggagttaaggcgacgccaagcgagactacccagccagtgggagttaccacacgagctaaggcgaccgctgaggcggtgggagcttcgaataagcgccgacgtgctggacttacggaggcaccgccaacccgcgagtcacgaccgcgctgtgagactaagaagccaaagaggtatcagggcacttattgacactaccattgcgagtgatgtccttgggcacaaagtgcctacgccgataacactgaaggcggcactaagtggacgacatggatagcagcggaaacaagctctggagcgagagtatgactctctgattgagaatactcgtacctttgccacttagaagcaaggccactgggtacttgcggtaaagtataacaccgacgggactgtcgagcggcttaaggcacgacttgttgcacaaggacaccaccaagagtttggtgtggactgcgacgaggtatacgcgccagtagcgagattcgagttgctccgctcagttctggcgattgggacgatactagattgccacattcaccatatggatgtgcgcactgcgttccttaatggcattatggagggtgagcagaagatatacatgcggcaaccacgtgggtttgtgaagcgaggtcacggaaacccgatctgtgaacttaaaaagagcatctatgacctaagccaagcccctcgcatctggtatagggtccttcataccttcctgacgtcgatgggttttgtacgctgccacaaagagtcttgcatctatgtgccaaaagtgggagatgaatggcttatagtcgtggtatatgttgatgatctgacaattatgccacgcgacatgagattcatcatcaggcttcaagccaagctgtcaagtcggttcaaaatgaagcacctgggagacattcaccacatcctgaaaatggaggtgcatcgcaatagaggatagcgcacgatgatgatctcgcagcgcaaatacattgcagagctgatcagtaagttcaacttggtcaatagcaccccagtgatgacaccgcaagttccagaactcgtactcgagcctaagacgaagctgagcgcagagcagatagctgcgcagccttttgactacagaggcattgttggatcgctccaatacttggcccgtgggacgggcccggacattgctaatgcagtaatggagctaagcaagtttctttcttgttacggccgcgcacgctgggaagcggctaggtgggtactcaaatacttgaaaggggcgtcgacgtacggtctgttactccatgggaacacgagtgacgtgacttacaaagtgtacatagacgcgagcttcgcgtgtcaacctaaagaacgcaaatcggttaaatatatgattcaaatggcaggaacaagcgtatcctggtgcagtagcgaacgggaagcgtatcactctcgactgctgaagcagaacatattgcacttagcgaaggagccaaggaaagtgagtggctgtggcatctgcttggggaaatgggatttccacagaaggaaccagagcaggtttggtgcgatagtaacggagccatcacggaaagcctccgatatggcactttggtggcaatcactcttcatgcacaatcagcgatagcaacggagccatccgcattgctaagaaccctggaaatcacaagacaaacaagcacattgagattcggtacttgttgacttggttgaactcggtcgcctcaagattgcctactgttcgacaacagatatgacggcagacaatctgactaagccactgcccacaaagcactttataacactaagcgaaaagctaggcgttcatcatctgaaccttgcccctagcacatagtggaagtgttgagtagagcagtcgttcctcgcagcagggcagtcggcagaagagccggcttgccggctacagaaaagaataggcaaatgagagagaaaagtctgaacacctgtttaatctgttagcaaattctagggaagttcagctctgaactcttatctatggacataggacagagaaagcctgcccacaaactgtttgtgcgatgaggatatgaagcagaggaatggtagccgcccgaggacgaagtccgaggacgagatcacttcctcttttgcttcagactgagcacatgatgagaataagcatagatatagaggaatgtgtgtaaatagttttcttcataatccacttacagcgtctcacgacgtggggtaaaaggtactaaaaaagaagccacttctcccctgttgcaggtaaaccagcaattcgagccttttttcttcttcatgcttttattttactgttgttgctttctctccttggttgcacgcctagcgagaactacaacttgcactcggttgtggtagcgtaattcgcggaagatgaacttggactagcaagaggtttcagccatttgttcgccttggtggatggtagacgaagttctgcttactacagagagcacgaggtttgataagtagtggatacctcgatttatgtttctgtggcacactatacgcattgtcctcgttgatttcttcgaacgtttctaggacgccgtcttaattcgcaatattttgcctttgctgagctgtgggtcacttagccccccccctctcgaccaacccgacagcattaattgtctttcgaattatcaactgctccttcaagagcgagcttcggagttttaaagaaccctctctcgtcgcgcgggcccttcgtaaaaaagccgagctaaaaaaagcgttacagataaactcctcgtcgaccctgtccgacgcctgcagcactgaagcggcaatataccgttgcttcagggctgcatccgagaacgtgcggttttcaataaccattttagtgtagagatctctaaggctacccttaaagagcttcatggcgcaacggtggcgcaacggtggtggacgtcgcacggagcgaaggtgctggtgaatacctcagaagaagagagagcacgtggagacaagagaagagaagctgcgggagcagaaggatgtcgcagtagttgagtggcttacaggatggctggagccacattgcatgtatcggagtacaggagcagactagttgcatgtaccatttatcgctattggtggcgggcatctggcggcgtgcactcggtggcgctacgaccggacccactgccatacattctcgaatgtcgggacccccgctttgtcaatccactccgtcatgatgttcttgtcacaaaatgcgttaattcgaatcacattattcggatcaatacactgaatagaagcaccattcgagctccagcactcaatcatgagatgcgatttcatatctacggacaacgaagtttggcccgtgttagcacgctacagagcacgcagcatgtctgtaaagtttccttgcccctgtcatcggtgagatgaaggaatgctcctcgctcagtaccacccccatgtgtacggaaatgttagcgccaatcaacaaggcgtgtgggttccagccacaccggtccgtccaaacagccgctcgccgtaccgcaaggggaaccgcagccctatccgctgctgaaagcggtagagccacccgaggctcggatggccactagctaggtagctccacaacttcgcgtagcacgaagttctgcactgtggagcccttggtggtggcgtagtcgtgccacgtcttgtattctgccaagttttgcatgacgttctggtcaggggcgcagagggtcagggagcagcggcgcttgctctggcgctgggcgcccagcaggtcgacgaattccgcacaaagaggataccttggactgtagtgcgcttgccattgccttgggtctggaacggctgcgtggcccagcgagcgagctgcgagtgtgtcagcgacggctcggccttgtgcttctcgtataagaggttctttagctctaggctcaaattaaagtattcttatactcttggagaccttatatatatcaggcgttcggtattcacgcacataactgtattaacgtttttaaatgataccaaaggatttagcttggttaaaaatcgttgttgctgtgccttcagcagagaaaaatcagttcgttggcagtctcgcctaaccacgacaagcatagtcctggtgtaacacatacaatctacgccacggtggttcctcgcctaatgtgatacaaggtagtaggctaccgatacaaaattaacaaaacgcttgatactggtatcaacgctaaaagtaacggcatgaaagaagttgaaaattatgagaagttaggagtccgtcaccgagtgcaactttcatggtcgcgaggtcaaccaaggcagataataaaagatagaacgagttttactcgtattcatggaagctgaggttatgaaggttctgcctattcgcaacagcttgtaggttattttttaaatcccgttggataaaacgccgaagccgtcgactgtgccaagttatgacggaacctgaaagggcgatagcgatgtaattgagtattgttgccagcgtatacccctggtgtccggatagtgtcaagaaatgacccgaatcacactacatggagtctcctaccctatccgtatcaatagacacgagtgactgtcattgcaggtgcgacttgcagcggcgaataacagcgacggtaccgtaaatcacggtggtcatgtaacgtcgtcaaacgtaagttgatggtgtgtaaaaattctctttaaaagtttcttgctgtttcgcttttttaagccaacaggaaacatgagcaacaacatccagtacaacttcatcaactgcgatgacacgcccaaaacacaccgcgccgtgatgtgcaacagattcctcattctcaagcccccgagggagctatttcgacggagtgtggcaatagcgcatcgtgtcacaaccaataggtgcacgactgctcagcgcgtcaagaatatacaacctataggggtgctgcccgcctcttcggccatgtcgccggccacgtatacggaaacgacgcccaggatgagctcggtgatcgacctgacatctccagcggcttcggctctgctagtggaagtttccacgcagatttcggcgcagggcgacgccagtggccgatggctacgggcttgctgccctctctgggacgtcacgtagctcagcatgatcgcggcttgggacttgagcatgctgatgtggggcacgacgttggcagcttcttcttttgttgaacttcacgacggcccagccctcttcgcgccttaggagggtcgctagcccaggatctggtagagaaagggctcaaggacctccgggctattgtcgcgggctaccgcccgcaagacgtctataatatgggcgaaatagcattaattttacgatagagagccgcgagactcgctgacggtcgacaagaaggagaaggacaagaagcagagcaagcagcgcatcacggtgtccgtagccatcaacgcagacggctccgatcggcttctgttgcacttcattgggaagtcgaaagtgccgaccccgttgagaaaccgcgatgtgctggcggagatcggagccatgtacaccaacactgcgaaggcgtggataaacaaattaaaacactgtgattggtttctagagcaaaatgaatgaatgcgacaagaggggcggcacatacgtctcctatttgacaatgtgtcatcacacgatgacggccccgttcagctgtccaacgtagtgatccacaagccccccccccaacactacagcagctctgcagcccatgaaccaagggataattaagagcctgaagaacgagtatcaggagaagaaagaagactccgaagactccgatctcgacatgttcaacagtggtgttgcaaactagccagtcgataatttctctgcgatgacgtagctatctgaagggtgggatgatatatccacgaaacaatcaggaactgttggtgccacacaggtattgtgtcgaagttggatatgggatatctactgaattaacataataaaaatggatgcgtatcataattcggctgacgattgtttcctttggcagctgatggattcacagcgttgatatggtccaccctgctgaattagaggtgtacgacggtaactgagggaggggaaactttaaataagttgacactggcgagttatggtgtgtttcagatgcatgtgatgtatttcctggcgtttagcagtgcgtttatcatattcggtcacgaacgaagaggaagcggaggaccgggaggatatttaccgctagctaccttgatttcataggccggcatcgctacataccttgattcgtaacgcgtcaactgatttgaaaaatatcagctgctctgttttcattacagccacagcgctcatattgtgcgctccttgaccaaggcgtttgcacaacggtcgcgctctcaccattttggtactctcaatgcgccaggcggtataggtgctaattagtatatgttcttctagcacgacccgcctgttaagtacctgtgggccctactcgcctgttattattgtccgcagttcataagaactgtcgtttgcgcccctgcgggtgtttgagataatgcaacataaggttttatgttgcattatcggttaaagagctatttgaaacaacagcaatgacagttgtacagcaattgtattacagcacagcagcgcaaactccgattcattattacagctcaaagcatgctttcggcgacaagctaactagacagcagcaataataaagaggggtgatcagtcagtcaatgcaatttgtgaggaatcgaccgaatcggggcagcaagcgaacgataggtaggtcgccatcgtatcggctaagttagtttaggcatgtggctgtcatttctaagatacgatatctgtatgtacatgtcggacgccacagcagcagcaactataaaccgtcgttgagtaaaacaaaattatcgctattgattaatggtcgtgggtgcagactgtttgttgagagtcgactttgaagtgaggagacctaaacggcattgaaatcagtatagcaattctacaaaatcaagttgcaggcgtcaaatttggacatgtacaccgaataaccccagaaaataaacacattatatattcaatatgaaccgaagctcagtctggcagcttgaagctgtgcagtatgtaccatgaatggcagtaacgctagtgtgagttcatgcaatgaaatgaaatttgcggttatgacggctgactacgcccgtcgccacgcactgctgcagcgccgcatacggagactcccgccgtagcagcccaatagtgtgagttcacgtagatccgccacggtagattgagcagcgtaagccatccagcaaatggacgcatgatatttcacagtacaaaaataagagtaagcgctaaaattcaagaacgtcttcacgcaactctctcctgcggcaagcatagcgctattactacatagtactactagtagtaaataaagttttctactgtgcaggttttggaatacagtaaaaaaaagaccgaactgcgaacaccgcgggccaaagcccgcataccagtactggtcacaggcgttgatacacgagatttacgtgtccgttctgagttcagtattttgagccctgtaaaactgatatcaccgtcggaatctgcgtgatctgggctaaccaaggagccaatcagcgttcccatgaagcgcttgaagcgtccagaaacgaggaaaagcgacaaggtccactgaatttcgggaaataattttgctcctcagatatttttctccgatctgaatagggtttggtcgccgtaccgccaaaagatttcatcctcctatatatgcgttgatcgcagcccatatgacctctatgggctgcgactccgggtggtacggaggcgtgaagagaaccttgtgcccccacttggacgctatcttgaccgtctcgtagctcggcggcgttttcttttcgaccagccgctgcaacaactttttcttcatctgcatggttgtcggtacgcccttgcgcaaaagccacttcacgtgagcttacttgttcttgccctttgccagagctgcgtccgcgtcgcgcatatggtatttcgcccggcccatcatgatgttgcaccccccgtacttgtgccacaacgtctcgctcagctgctcgacccagttctagaacttctcgctcgtgaagttgccgtgatagtcgtcggtggcggagctggcagccttgtccgccgcccacactttcacggagccctcgacccactcgctccgcgtgcgataattgtccacgcgcatgatgacacctgcgccaatgatacaaaagcggcgcccttttcccagagggtagcgagcgccgcatcttgggaaggaggcatgtctgcttcgatacgtgatgtaagttgcagtaggctcggccaaatagacttcggtgtgtatggcggtgctcttgttgaggctagcgcactttttgcgcaggtacttcaggcggtacgccacgttcactttattgactgcccgaatatcgcgccgctcgcccaccttgtacgtgcagttcatcgctcgtagcctccttcgaaccgtgcgggcagacacggtgtcaccggtcagatcttgtacgctgtcggcaatatgctgggacgtggtcggcttgcctgatataatacgagccgtgatgatttgctcgaatatatatttttatatatatgtatatttcaactgactctctcagaccaataggtggctcagcagcaccgtcggcgttccgcgtttgcacttgttctccgcgaccacgacgcgcgcgacagtagccattctgttgccaagacacttgtgaacacgctgctgcacaccgcgtttgctggggttcagtccttgctgcgcttcggccagaaagtagctatgggtacacagaatcagtttctttttcagtctgagtaagatgcttcatggcggcatgtctgcaaatgagactccttgtagatagagaacttatgatctgtgtggaacggcgcttttgtagtggtagaacattcttgtggtagcgctacagctaaagttctagccaaaataaaaatctcgtgtatcaatgcctgtggccggtacaatagttccgttcagctgttgtctgctccacaagcagtatattttcatgttgccttatatataacatgtatttctccagtttgcatggaaggtgcacatgaacttcaacgagttgaagtgttacatgttgaagttggaatatatttttaaatatctgagctataagacattgtatgcatatacaaacaatttccccgtgaataacaatactctctacttacgtcatatatattaaagtaaagtattaatatttctataaattggagcctaaggatactatgactgtgcatccttatacttaagagtgatcgctactcgatacgcaacttcataactaattctaaacgtttgaagtcttcgttttatactaaaatgaataggtagttctcagcacccgaagcgctcgatacgtttagcttctaatgtgtgcatctacactggttacatgttggttttggacctcacaactagcttgttactcgtaccagtaggttgtgaacttggttgaccgctcgtggaagctgttctgcttcgtaatcttgcacagtggcatcgccaaaccacttgtatacgtcgtccgtgtgtcacagagcaataaacgcaccaacgacagagctgggttctgcggtttgttctggggtaacggcgcggtcgtccactactctccactggagttgttgcccagatcgccttaggaatttgctgacgagagcaatgccatagaacctttcctcgttggatgctcgtgtcagggtaccgcgccgaatagatgggcggatgggcgacatggcgcgcgtctccctgggacactagccatggcggcccgcaactccaacaggcccagtagcgaaagaacagctagcgcatgcgaacagactcaacccgaccggatgaatctcttgcaggtgtaccgtagaaattttcgaactcgctcgatactcttaaatggcaatatcggtagaagatcaaaaggagcaggcctcgcttgctgttccaccaacccaatgctcgctcatcatcgacatcggcaccgagtataccctgccccccccccaacgatgtacttggctatattgaaaaggacaggcacgccttttatataccagtttgtagttgcgctggggcaacgccaagcggctcggccttggccattatctctgggggcacaggtccttcacaaaaaggagcgattgtttctgggcacaggttctccccgcttgaccggagtatacatggtaagattcccagtggtaccccattcgtagaggcttcgagaaaagggggcgcaggttttcttgatcatgctgtggtgcgactcaataaattgctgtaccccacccactcccgccccattgctgtgccatcggttctaccgctcacccaaatacacgtattgaaacaacctcgcggaggcactttcgctacgaaagacccaatgttctgttatcacatcatcaagcttcaaaaacggctcgtgggtgcgagcggagcgaagcagatcattcccaggtctaggaacatgtcagagttgaccaactaggttttcttctgccgcgcgttgcgaatcaggtcagaccagcctgtagttagcgtcacctcaggtcagatgtcgacaacagccgactcaagttgtgggaccaggccatacctaccgagtcgcagtcgacaacagaccagccaccaaaatgtagcttgtacgtgccgtcggttgcacagactagcgaatcttcctgatccctgtcggaggtgagcacatccccacgacgccgaaatagtggccttccccctcgtccagaccattgaaagtccagcacgatcaactcatccacccttcgatcctccacgtcatgaactgtgtacaatttgagtacactcgttgacttgcccgtgtctcgaaggtcacgtggttggcgatgtcccagtcattagcagaactacggaccaagaaagccttgccggttttgagatgcttgcggtttagcactattctaggctggccacggtacctgtggtttagcactggcctcagctgcatcgtccaccaacccatgttcagcaggacgtctactttttcgaggagctgggggtgaattccacgccggttcacctcttggatctgtattccctgactaccagtctactcgagatgatactgggtggggacgtcgtgatcacgtatggtcttgaccttgtagcggtgtccacactcttcgtgcaatctgcagcgatagaccctagcattgagccgatctgtcacgtaacgactattcgtacgggtacacgtggtggctctacacgttcatcgcccgctgtgccgccctgaacgtcttagtcacggccaccaacacgtacaaccggcgtggagcagcttcctatgctgtatccacttctaacgcacattcgcctctttaaagtcaaacgcagagccctcagaagcctcggcgtatataggctcctgagtcgctaactgtcgtagtcgatgcacgacttgcgagaaggtcggacatggcatcggcaccttcgccgccctgttccatactcggtggaatgtatgcacgacccaggcatcctttgcggtggatgtcagaagcagaagtgtgttgtgaacgttgccgtcaacgccagtccagcctatcgcgatattcacaacctgcacaggtcgaggaccagcctctttcaagacaacaaggtcctcagatattagcacaagcgccgaaacccgttaccgcattccttcgtcacgcttatatctaccgtcaatatttcttattgtctatgtgcgacacatcttcagcacctgtatctgtatcttgtgctgtagacgacgatgccatgttcgcgtgtgcaaacttaacttggcactttgtcatgtcggatcagcattgacgatagtacaactcgcatatcaaccgctctctaggatagacaggtaaggagtactgcttctctgatgatattcaacagctcaacggtgtggctaacaggcgagcaggggctgtaaatgcccaacaggtcagcaggtgttggacggcaggtgttagttattttccaggcggtgttcacgatccgcaaattccggactggggaaatgcgtatgcgaagcttacgaatgttttcccacgaacaatttgtgctacctgactatgattccaagttcaccaaggttacctacgggattcggttaaacgcggtgaagatggcgttttgcctacaccttctggtaagcgaatcaccgtctgcggcagccagccgagcgacaaatgcgcaccctacaagcagtggtggctttttcacgattcttattatttaaactaagtggaaacccatgtaaaaaatgttaacaaaaaataactaataaaaatgtggaattgggtggatatctcaattaacaactctcagtgcttctctatcgcgtgcaacttgcgtggtgcagcggatcatatcatgcgtcatgagcgccgtgcagcaagcgcttacaggtcaggcggcggcgtacacaagcgcgtataccacatctttcacaagcccccggatctgagcctcgcacgacacgaagatgcgggataaagacgtctccattttcaacaccatgcacgacgtgctgctgtcggccttgtcggggcccagcatcatcttgccgcggatgggcggaggtctcgtggacatgagcggctaccgcagcagtatctggagcactttgacggctagaaataggcgagtacggagacgaagagactattggagtgccagtttgaatacacttagcactgcttgcgcctcagcttccagcagcaatgcgggaggctgggatgcaactgctgaagtcagtacaagtttcagtggcgacgctaactactgttgtgcgggtcaaaacggtggaaacccaggtggtggtggcgctactgatagtgcaaacagcagcgataggaatgaccgaccatttacagcgacaagacttgagtcatacgatgaccgtgttgaagcagcaaaccgacggccttactcacctgacaacgccacacgttttccagaagagaaaacactacaccgggatccgcggacgaaaggaaagtttggcatcgctggcaacccatgtcccttatggcacgcagtagtcggttccaatcgtactctgtagtttgtagcttacttcgctgactttaggttctgcatatcaagttgaccaacaagtataacctaaatactaaaaaaaacgtcttcttgatagtaaagtgagcgaaaatccacgcatacacttacgacgtttgcagcagcagtcgagttctgcttagcatcactgcttgtctccttggtttgcccctccttcttctttttgctcatgtacgtcctgtttgccatgaacatgtaagccagtagcagccagaaaaagtagcaggatgcgtctgccaccggtcgatgacaagaccgacaaatatcgcaaacacgacgaacactctcaccacaccattgccaatccagtcgtcgtactggtggaacaagtaactaggggcacgttctggaagaagtggaagccgttgatgaaattgacgtacatcagcccgatgacacagaagatgcgcgaaaagcgcagcacgtttcgccgaaaactacatgccttgtgcgtgtggcttgcgccagcggtgcttctggtgcttcctgacgtcgtagcctttgttttgaaccaatcgggtctcggatccagctgttacagctcttgatgatgcacttcaggttcaaagtgttgtaggtcgccagaatgttcacgaacgccgacacgacgcccacaaacaagctgtaccacaatacctgtaggtacacacacaaacaagttgtaccacaatacttgtaggtattgtagttctgcaaatgcatctaagacgcgatcaccaatgatatggcgatttgggacggcgccgagaacgccacaccgagcgttcaagaacacgagcaaccgcctaaatgacaccaatgccccaaaaggaatcagggagtaaggtttcagcttgaaactccaacagcaggcgccaaagcttaagtttttcagcaagtataaattcagctggagaggtgcattgcgcttttgtaaaccttctgcaccccggaacgcagtgccagtggcaccagtgaggtacggacactcagctaagtgcttcttctctgtttccttccgcccgtgaaggtgagtgggaaaagtgaccgtcgctttgtccttaacatgtgctgcgtagcaatatatgcgtgcggtccaccacattgtcatgttgtacttctcattcggtcgatagcagtttgtactaagagcacttgaagggcgcccacgcttgagggtgccagcctcgtcatcccacagaccgggtggaggtccacgaggatacagtagcgcaacaaagctggatgcggcggtccgaaagccagtaactcgacgatgactacgtaggctcgaacagagaggcgttcttgttagggcactcttcttgtcgcagaaatgagtgggatgcatcaaccaaatacattatacgtcaacaatgtaagcgatcctcgcaaaactgtttttaagcgcatttaagcatttttttacgtacaaaggtgaaaacataaatgtataaataccatcacggctacaaaggtatttccttagctgaaatctagactggtgtacgaggagcgagtagaacacaagcatatattgtactcgattgtgtttgtgttgcatctttgtatgcggatgtaggtctcaatttaatttcgtatgcgttctacgctaccgtcgtctaatgaacagctaatgcattgtttcggcttcgtggttcgatcgccacagtcagcaccgtcaccaccatatgccttaacacctcatggcggtgatccccgcagcgggcacgctagttgcgacactattagacgcacaagtagctacagctacttgtgcgccaaaaatagcatttctcattttaacccagtcgtgttcggagtctttatcttgtttaaagtgagctcgtgggtctggagtacacttaccccaaataaaagaagcccacatttccttttacacgtgcgcacacgtgggagctattgtagcgagccacggtaggcccgcaacacgcgtcgtgccgctctagctcgcgcctttctgcttcctaacgacagcgttctacctcgcattgtgcctgcagtccttcaaggcagacgcgttcatcagtcagattatgtagcatccgtatccgcagtagacccatgaggatcccaacaccatgactcacagctaatgcctgctgtcggcgaagtagtggacggggaaggctgggtctgggggcgttggaagagcgcgttaaccttgggaagtcagccgatcgccataaagcggtcgcattaaagcggcgctgaatggaaggcgacttggcggctggagggtaagttgctttgttggagcatgcgggcagtgaccacaagaggacctaaaacactcagtgacactcatgccgctgttgctatctctggaccggtctcacctgctacgccgccatctctttgtgccttaaaaacgcaagcgtttcgcagtgtgctcatcggatgagcaagattgcctatccgaattcttgcgcgacagagccttatagaagtggtaattgtggctgggaagaacccatcattctcgccccagctgtaggctatcctccagcgtcttatgaaaactctgtgagttttgggtctgaactaacgcaatgatggcgtgggctctcaacgatgggggctgtgccgttgtagtagatggttgagtagtcatatgcaggtgagcgtcaaaatgcgagtgttaagcgtactagaaaacgcatgatcgtgtctggtggggccgattcagtggggtagcccgacaacttgactgagccaatgcaagcagtggtcaggatacgttcgctggccacactttcgcgccttgggcctatcctgcagttagggaagtcggcggacggacaggatgcgtgactccacaccgaatatgagcgctgatccggtgggcgcatctccaatcctgtgagcccatgcttgctgcaagtgccgggtcccaccaaatctccacacacatccacaatccacacgtcacactcgtctctaccggatctccatctcatgcgaccaatcacagctcaccgaagggtccacgtatccatggggtcggacatgggtgcagacaaaaatctgtttccacatcgtgtcagcaacgtaccgccgtctgctctggtttatggctgacgccgcagaccaacaccttcaacctggaacggtgatcgccgacttcgagcaggccctgattgactcagttcaagggcagttccccgatgcacgagtggtcgggtgcctattccattggaagcaggctttgcgtcggcgattggtgggcctcagcatgtctcgagtggaaattggcgttgctatggagattggcgtcctcgacatgttgaccgtagtaccaccgggccaagttgacccgtatggaatcgactacgccaagaggaccatccgccagcgctgcgagcgaagggggctacactattcctcgacaagatggacacgcttctgggtctacttccggcgaacgtggatggtgcgctttccaccggatgtgtggaacgtccaaggaatcgacttgcgggttgtgagccggacgaatgacccgctcgagaggttcaaacgcgagttgaacacggctatcacgaccccgcacccgagtctcccgtcctttgtggggacgatcaacacacttttgcagcggtacgttcagcttctgaactatataaccaaccgccgggcagtggccccagttcaagtctcagtgtagctgccagatccggtccaactcgtgccgttgccagctcctgcacggcgtgcgtcgcgtcgtactactgggggtcgccgctctaacaggggtcgtgggggtcaaacggcccgagccacgagagcttcgaggtgtgctggtggacgaggacaacgctcggctcgcaacgcaagctctgcttgattgaacctgatagccttaatgtatatctagattatattgatagttcataaaatataaaaggctttgcataacatattggtccgctctgtgtagtggtttttgaagggtctttttttaggtcccattttggggaagacccataatggaccggccccaccggtgactctttaaaaaggttaccgctaccaccaataccgagatagcgattgacaacttcgcggcacgatgtcattgcacatttttattgctgtctgcattggccgtttgtcacatcaagccatgcttgcagatgacaatcgtgataggcgaaaacggcgtgcttactttctgcagcaagtgacagaaaccaatagcgctcgagggagtcgaatgcgggacgccctcagcaaatttgttccaaaccggaacaaattgtgccacgaagcagtgcttttgatggcgtccgaaggctacctattggtttgcggtagcgcttgggtggacagcgagtaagagtagtttttattatatggtcccttacggtcttgagggatgcatgaaaggtggggtgggggggtcgatgggattccgattgggtgaacgggcaggccaatcagtcgcgagccccccccccccatcttgctcttcaaagaatgcactggtctcctgcgacgtgtgaatggaggcattggcttgttcgtcgacaaagtccatctcgtagtttaggtgggcataggccagcaagaactccgaaatagtgtagatgtgctgtgccgaggcatgcggcccaaccagcatcacaagctccatattttcctcgacgctgaagctgccctacataattacagagtctccgccgttctgacgtctgactgccgtctcttgcggtcgtctcaggccgtgtcagtagctttgggtccgtccatggcgaacttcgtttcatctgaaaaggtgatgcgctacctgtccttcttcggcgtaaccactatgtggttagcgcactccggacggtgggaaggcagcgatgcatctatctcatacacgtaacccaggtcacagccttccactaccaaacaagtcattccggtagcatacctctctcagaatgaagaagaattgactgtaatcgaaggaccgccactgtaacctgtagtaatggctacaaatgttgtatgaacctgaagtaatgggtgaaatgttgtagttgggtggttctcatattagcaccgatttccaaatttgtgtacatatattaaccgttgcatcttcatactgaaaaaaaaatactggtacaatcagagacggagaaagtaaaacagtggagagggcgagggatatatacaacttctgcttcaataaagaacacctgatatatacaaaattgtgaaaggtaatgcaatattgcgatggcattatagtcaaatttgtatgtgagccaatcagaatccatacaatataaagggttataggttttctagtgttcattattgaagcagatgtctgtacattttttgtcacgaaaatgagtgcttactaggaattaagtaattcaagtagattgaagcctttttgtaaaagtctaagtaggtgaatgcatcaacttgcaagtagattgccacagtcaaaaataacgttttatcaaaacattgaaaacgcgataagaattaaggacagggtaagatacgaagatgatggaggacgagcaaaaggaacatcagcgataacaaaataagtaggtgcctcattattgaaaacatcatggtgtccctcgtgccaactgctccctgtgcaacaccaacttggctgtctcaagtctgcggcagcacgttggcaagcgtgcgtgcctggaaaagcggtacccgatcctaaaggctcagcgactggaaacggcccgagcctacaagcgcgagtacgataagctgtaccaccgcgctcgccgtgacgcgcttaacgagcttggcctgcgtatcatcactacggccgcaggtgacgtgaccacgactgttgttgagtcgctcgtcctgcctgtgcctggggacattgagttagggggttcaacgctctgctcgacgacgtcgtgttttctcggcaccaactcccccaacggtgatcgacattacgggagaggaggaccaagacgaggacctatcaacttgcgccatttgccagtacgcgccagtggcaccggtcaccccgcgctcataccggcatgctatgtgtgccgagtgcatgtcatgtacgtggcgagaagcattcaggccgaagatgtagctaactgccctacgtgtagagttcccattcggatgtagccatccggctagccatacagctttattttcttcatttttgagtaaaaaaaaaaatgaatgtttttttactttattttgatgaaatggtctaagcagcaaatgataatataattgtcgtatatacttctttcatttacattgcgtcagtatcaataatagcgcacaagaacaagtggtattgttgagaagtaaagtcgtacgatcgtgcgaattatcgctatggaataccaattttcgtcaagtcacagtaagtatcgaagtaacacattcgtacgatattacagatataatatctttcactgaagtttatccttgcagtatattatctatccatgaactatcacgtgtataatactttccttcgatctaagttccattaaagttaaataagaattttatgatatcattttcgtacgagaagacttttaagataaccaaggtccgttctcaacgtattgacactaagaattcgaaatgtatgttttgctttgttatgcttttgcaaagacttacgactttactgcatacgtcttgcagctctagtattattgagtcatagcaatggcaggcaacaccgcagaacctggtcgtgcgggcctgcgtttgttcttcggctttggacccggcttcttgccacgcttccctaagccagcttcagtgacgatggcttcaggtactagcagttgaagatcctgagcgatggtcgccgagcggacggtcggcacaaactggtagtaatatgtccgccgcgcggccgacacggtgtgttccttccagcgaaaagctcgctcgcgtgtattccgtgatgaattgcagttttgactgcatggacacacgggaacatcaggtcttgccagcgtcggcacgtgcattccttctcgatcaagttcacggttcgccacagatgggcgtggtccggtctgctgctgatgtccgtgaatcgcaccatgtactggccatcaaggcacggcaaaatctgcagggttttcgtaagagccatgatcccgtcgagcttcttcttgtaggtgggaaggagaaagtccgagaaggctgcaggggtggtcctcatcacgtcaatttcgccatcgtcgtacggctcgccttgggaggtgctcgcgtgtcctgcgttgctacctggacccttctgtcgcgaggaggtgcggcgcctttcggcgaacagctgaaccaccttgacgaagcattgctcgaaagcttccaaggggtaggacgaccgcactgcattgcccaaccaactgttcgctgcctcggacaggttggaagtgacctcgtcataagagggttggttgtacttctcgttgaacgcgtatgtcagtatgtgcgacttgtcaattccagcgagatactccacagccaaagggcgaggctccgagagctttgagctgtaaaacttgtagtcgttctcgcattcgctacgtgccatctgaaacacaagcgactgttctgccggcgtcagcgcggagcccttcttctcgatgttggtgataatgtgccgaacgcaaaatcgatgtccggaatccggatacaactccgtcacagacgccaggagacccttctgtctgatacgaacacaggtttccacgccgagacgtcttgaagcgcgtctttcatgttctgcaggaaccagctccaattcgagtaatcatcttgatcgacaatagcgagtccgaaaactaggatgtgaccttctaggtccttcgtggtcgccaacagaaacaccccgtgcttgttcatatcacccttgagatgtgttccgtccagaacgatgacgtgtcggtagtgttgcatggcttgaaggcatgcccctggaaaaacgcaagccctcctaaacatgccattctcgcgcctgccaaacccgtagcctgtcttggggttcacttcactcaccatggctagatatccctccagcttctggtaactctcgacgacgtcgtcgcgcagcgattcgagaagatcccgcttgatcttggatgccgcagttcggttcgttatcatccccttagtcatcaaaaagtcgatgatagcccgcccattgaccgaggcccacgttccgctgtaagaggggagcatctcacgctcaacgacgcccctcatcactcggtagggcacatcgcgaagtcgctgacgagaggtatctcctgcgagaccgccttcaacaaaggtatcgccctgaaaaccgccgtgtctgaagtggtcaggggccagacacatccttgtcatcttccagttgtcgcggatcccgtacaccgtgtgaaaaatgggcagttggcagtgctgcctggaatcagctgctgctgccctttcaccgccttacaagtgtacttggcgtttccttcttgacgacgagagcgatagctgttgttggccccgcgaatggaaaagccacgggctcgagcaaactcgcgacagcgttgcagcagagcctttttcgactcaaacgtcacagccgcaacgttgttcccatggtcggaaactgcgccgtaagaagaggagtcgcggggatccaagccgacatctagctcaggtcgtagcatgcgcatctcgatgagttcggtgatgtccgcttcttcgacagcggatgaggtaatcatgggcgaagacattgtccgggtgaccgaaacaggagaggtggtagaggtgttgaggcgtgtagttgggtgggtatccgacaaaaagacgaatgagccctgcagtgaaaactcgcgagctaagagaacacgggctaaacgacgtggttatgaaactcctgcagagatgggtttctaagctccggcccaagatactgaaaaaaatgtatgaacgtccgattcaaaacgtacgacaagaagctcagaataccgcgaagtggcatgctcggaatgcccgtccgttttaaaacttacgagtcgtaagtttttgctgtcgtacgttacaatagacgtaacagtacttaacagaggcgtggcctgctcagaatacccgtccgttttaaaacttacgagtcgtaggttgttgctttcgtacgttacaacaaacccaactgtacttatcagactcgcggccgacgaaattttaatacagaaccaagtgcgttagtttggtctgcgtgcgtacaattctacgaagcgaggatgtaaacttacacattagcattacgacactcttactctaaattggtaatttcgtgcgaaattacttggccctggaaaacagttattttgcccataaaattaacgttcagttcggatatgataaaacgttatttttgactgtggcaatctacttgcaagttgatgcattcacctacaaaaaggcttcaatctacttgaattacttaattcctcgagtgcttacgatattatgagccaccttcagaggtggctgataaaattgtaagccatgagcagaaaagctcgagggaaatgagcatcagcagtgcaacattgtgagcacttatttgggcaagttcgagtccccctacatgtattacagtagagaactttactttaagtagttgttggaatatctccgggtttggaacaaggaaaatctggatacaagccggataggttacggataaattaccagcggatgttccaatactcaagtccagtggaacaaggcatttttgctccaaaatctcgacttggtctggtattagaaggggggactaggttttaaggcgagtgggtcactacggatgtccaacaacggacgcactgatgacgcaatgaaccaatctttttttaagcccagtgtttcgaaatggagcttagcgctgacttttattccaactgttttatcttcgtcctctcatagaactacagcgcatgtattggaaggtcgtatgaccacatttctatattctgtcctgacggcttaggtggtgtcaccgttgcagggaagatctgtcgttgcaataaaatgctggggatacatttaaagtatttggtggcaccatttatcactcgcccagaagcggtttctgaactcgtggcagaggcgtgcttgtaaattgataggcggtcataaattgggatagccgccgctgaagcgcatggggaagaatggcggcgtcgcgcagcagtgcaggtcaaccgaagctcaccgtcgcggcaacttggtgctgggaacggccgttcgccgcatccatgtccatttaacacgttttgcgcagcgtgattggctggcgctcgcctgcccatctccctcgtgtgcgccacaccgaacttcaagcgcgcgtcgattcgccgaaaatctgctctatgcgtcgcgattggacggaaagaggcaatgacgagtcggtagcagttatcaaaggctctttgtttctacataccatctttcctccctcgtttcagataaacgctattcctgattatttattattgcgacgtttagtccaataaaagttcccatatcgtggtattattgtactaatttatactattaattctatcaggtagtccgccagccgaaacacggtatcttgtgggctccacagccatacttcgccactttgaacttcgccggccagagcgcaagcgacccaagcacccaccacacacacgcacgatgctgcaccgcgccctcaagagctcctcgctgctgctgctgccgcgcgtggcgcccgccgtggcccgctcggcctcgaccatggcgctgcccacgtcgcttgagcgcctcttcgagaacaacaagaggtggcgcgagggcaagaagctgctggacccggactacttcgacaagacgtcgcagggccagcacccgcagtacctgtggatcggctgctcggactcgcgcgtgcccgccgaggagatcacgggcctcgcgcccggcgagatgttcgtgcaccgcaacgtggccaacctggtcgtgagcaacgacatcagctcgctctcggtcgtgcagtacgccgtggagcacctcaaggtcaaggacatcatcgtgtgcggccactacggctgcggcggcgtgcacgccgccgtggagaacaagcacctgggtctgctggacaactggctgcgcaacatccgcgacggtaagatatatggggcgacccatcccggtggtgctgcgcgtgcttgtgactaatgatttattgttgctattgcttctcgatacagtggtgcgaatccacaacgacgagctgcaggagatcgacgaccacgagcagcgcatgcgccgcacggtggagctcaacaccattgagcagtgcatcaacgtgttcaagatcggcctggtgcagcgccaccaggtcaagtacggcttcccgcgcatccacggcctggtgtacgacctcaagaacggccagctcaacgagatggacattgacttcaactcttacgtcaagaagtaccgctccatttacaagctgcactccttcccttctggagaggtgcctctgcgccgatcccagctgcagggcaacatgattagaaatctcgtcgagggacacgaggaggagccgggccgtgtgagcgccaagttcatcaagcgcgccatgtccaaggagccgattctcttcagcgactctgagatcaacagtgccgttgctcgggcccaggaaggcgaggaggacaacaacacggtcaacatcgagaagctcgtccgatacttcgaccactaagtatcccccttccgccacggcggccgcaaaccttacgcgggtcattatgctttagcggcaagaccaaataatgtcatgcaacataaccgacaaaaatatagcgaagcgaacgatactctgggagcgctctgttattgtttatagcggccagagaatggtttagcgcgcgctaagccatacgcatgcagaatagagagggtgatgcactaattcctaggtagctgtgtcgagacggacaagggctcgcgttcctattgtcatcaagcgtagttttcgacggcaggaaacccacgagcacagctagttgcaagagcatccattcgagttgccgccactcttggtgttctcggtcaacttcaagcaccaaaagcaaaattcgtcagataagaccggatatgcaatgcaaaccatagagagttcacgctgaaacgaacttaagatatatcttaccttggtgcctgcaggccggttggagtcgccaaccatttcacgaatcgtgatcagctcggaagccatggtgaggaaggcctcctccacgttctgcgcgttcttggcactggtttccaggaacgggatggacaagctgtctgcaaaagccttggcagtctcgtacgacaccgccttgttgtcgctgatgtcgctcttgttgcccacaagcagcttacacgtgccttcactggcgtatcggttcacttcgtttaaccagtcgtttacatgatcgaacgattcctgtgtttattcaggacaccgacagcaaagcgtgagaatctataccaaaaagatactcaatgcagtacaaacagcaagaatagtgacagccgaattacctggctggtgacgtcgtacaccatgataataccgtctgctccacggtaatacgcactcgtaatagtgcggaaacgctcctgcccagcagtgtcccactacaacaagcccccattaccacattagtgagaccatcaaatcactgcacaagtcacagcccctgccacactcacaatctgaagcttcacagtcttgttgtcgatcttcacagtgcggaatcgctgcggtccacaacagaattcaaacaccacccacgctgtcagtgcaacagttccccaaccggaccagcaccatcatcaaaccacgtacaaagtccacgccaatggtggtgatgtagctttctgtgaaggcgtcgtcctgttttaatcgtaataccaagagcaatagattagacgtcagcttagacgtctcactcgtacgaccacagccgtccgcagagcacgcaccgcgaagcgcagcagcaggcaggacttgcccacgcccgagtcgccgatcagcacgagcttgaacaagtggtcgctataacacacagcagcaaatagcagcgctatcgttagaggaaacggctccaagcgtaggacaagaagagccgcggaaaaaagatcaagcgaaagaataaaaactcactagtccctcgacatggtcgttgtggctgctgaaactagagcaggatggacgaggaggacggggagtagagcgcgctgctagtggcgaggcggcagctccagcgttgagagaggcacagaggaaggaaggaagtcgactgccgttggtgtcgcccgtaacttagctgtcgcttccttctttgcagcggcttccctctataaatagccaccttgaaggcatcagcattgacaggtcgggttcatatcaggccgatacgaaaagcaagtcaaaacgatgtgccacaccacgcggacactattgtatgtgggccaccccgcaggatcctggttacgcaagtttccgaaaagctcaacggaagaatggagggcggagaggcgagtgccgcggcggcgcccccgaccaaggtgcggcgcggcagtggcgccgtcatctacgagcagtacctgaacatcaagaacaacacgctggccaatggggatggcgccaagaagcctgcggagatctccaactcgacaggtaaatggcgcgtcaacggcaactgctgtccatcgtgggcattttttcttataccagtatataaatattttaattgagaaagttaatgactaattattttttatttatatattgtttctgttgcgccactcgcagatgaacaagagctggaggctggagaagtggtcagtacagaagagaatgacgctgcatgtgccaacggatcctcgggccccggcgcgtctgctgctgctgctcctgctgatggcaagtcggagcccgagggagagccccaggcacagcccaagcctcagcaggtagcggcagatacgccgcagcccgaggcgtctgcccctgctgctggaagtgacacgcaactaacggccgttggcacttcttgtgcttctgctgctgcccctgctgccgctacgccgtctaccactgcttcaactggaacttctgacgcgcctcctgctgttgctgatgctgctcctgtgtcgccgtccgctgctgcgtttgaacgcgctcgtgctcctgcgctgtcgaaccctccgtcgccgtcacattcaccgcctaatgaacagtatgcagcaatgcgagtaaacacaccagtcaggatgattaacaacggacgtgaaatggcgtcgccaagaatgggaggaccggaaggaccgagatcgccgagaatgggcggtcctggaggcccaatgtcgccgagaatgatgggaggacgtggagagcctccgagaggccgtagtcgcagcagaagtcgcgggcgcgatggtaacggtatgccgggtgatatgaacggacggggaccgccaggcaatggacgctttgatggtcctcctcccagagacaatggacccttcaacggaccgccgggaggcccgcgcagtccccgcggtggctttaatggacgatccggcagcccaccgcgtggaggcggattcaatggtccaccgcgtaatgactttggaggcggccgtagccctccgcgtggtggcggcggctttaatggacgaccggggagcccgccccgtaatggcggattcaatggacgaccggggagccctccccgtaatggttttaatggtggacgcagcccgcctcggcccggaagtggcgactttaatggaagacctggaagcccggctcgtaatggtttcggcggtggacgtggaagcccgccccgtaatggtttcggaggtggacgcgggagcccgccgcgcggaggtggtttcggtggcggacgtggaagcccccggcgcgatggatttaacgggcctcctggccaaggaccccgtgggcgctctccgccgcgtggtggtgactttgggcgtgggccaatgagtccaggacggggcccgccgcgagatttccgtgacggcccggggccgggacgaggcagtccgatgggcggacgtggccccggtggcccccgccgaagccgcagtcgcaatcgcagccctccgcgcaacggtaatggttttggtcctccgcgtgatggttttggtggtcgtgggcctggcccaaggagtccgccgcgggatggctttggtggacgtggcccgggtggcccaaggagcccaccgcgagatggatttggcggtcgtgggcctggccgaaggagtccgccgcggaatggctttggtggacgtggccggggtggcccacggagcccaccacgagatggctttggtggacacggccctggtggcccaccgccatttgtagaccgaggcccgtcgcccaatggacgtccgtttagccctccgcgcgggggtggatttggcccccgctttgacgaccgaggcccgccgaacatgttcccgcctcgcggtcggagccgcagtccaaatcggccgccttcgggcgacatgatgcgcaagagagaccgaagctgggaacgtgggggtcctccgccagatatgatgcagcgtccatttccatttaacgacgggcgtcgtgctttgcccgacagccctcgcatgatggagccgcgttcgtttgacgtaagtcgtagcttttgtggtgtggttgtcggtgatgttgtatcttatgtgtgaccattgtattccaatttgtgtagacgcctagcgagtggaactttgagctaaagcgtagtggcaaggtcaaatgccgttgcagcgctacatcgctttcggttggcttcagccgtcaattgtacgttgtagtcccctgaattctgtcatcgagtggtaatcttacacgtatctgctccaccctgtgcaggccgctgtatctggacgtggtgtcgctgccacacctgaacaagtacagcgagttcctgcagctcgagcggccgaacgtaagaagggtcgtgtacgagctcaagccggagtcgatcgcggacgcgagtggctacggggagttccgcgactacctcatccaggggcgcaacggccacgcgcgcgcagggggcgcctcggagatggagcctcaaggtttcaagatttttattctgcctccgggccaagccgcgcggcagcttggctacaaaggagaccacatggtcgccgtcctgcgctctcgctgaatgcacagcgtgcgtgtgcaatccatcagcctctccactccagcttgccgtcccattcaagtgctcctcgacaagacgcgcgtcgaacgggtggggacggttcgcccgctaagcgcgtcttgtcttgccactgccgcttcatcctttttgcatgcgttctcgtccatcgtgtagtgtagctgctcgctaaccgagatgcgaaatgtctgctgcgttctcctccttcgatcgttcctcaactagctgtctatgcagtgcagcagctacacgtgacgtggtccacacctccttcggtgctgaagttttttgcgccggcgcacagtagtaaccgactttgcaatcgaggcctggagcaacatcaatggcgcccatgcagatgagcgacgacgcgtgccgcgtgtgcggcaaggaggacgacgaggagttcctggtgctgtgcgacggctgcgaccgcgccttccacaccagctgcgcgcagggctgcacctgctgcaacaccaagccgcgcaacaacttcgcgcgcaagccggcggtgcccgagggcgactggttctgcaagttctgcgccggccgcgtgcccaagctcggtgcgtcctttgctgctacgcgtcagctctccagtggcgccgcttaagttgcgggatggtcgtctaactgtttgtacttgttgcgctcgagcagaggagggcaagaagcccgtgtcctcggttttcgcgtggggggacaacgaggatgggcaggtgcgtcgttgttctggtgttgaaggcgaaagatggctacatttctgtcgaaagtggtggaattggtgttgcaatgggcgtaaagctgacgttgcgttggatggtgttgtcggtagctggcgcttccggataccgaggagaaggtgatctggaagccgagcaaggtgcacgagctggatggcatcggcgtgctggacattgcttgcagcgagacgtgcacgtacgcgctctgcaatgacgcgaacctgtactcagttggaacgggcgtgtacggccagctgggacaccaggacgtcgtccacgagaagctcgttcacttccgtttggtacgttcttgcccctcaatgatttgctacgatctttctggtgaagattcatggcgcgtgcgtgtctatatgcagatggaatccatgacggaggacaagcgttcaaagggcgaaggaaggtaagaactgctttgtggcaacgttaaccccttcgacgcgtaagcatgcctaactaatgaatatgcaacgcatgcaggttctcacagatccacgcaggagcgggcttcggtctggttatcacgaccgagggacacgcctacacgtggggcaacggtgagctcggccagctaggccaccaagagaacaagaataagaaggtgccaaagaagatttctgccttgagggagcttgaagtgcctgtcgatctgggtatgcctttcgtcacagtatgcgttggggattgctagctaaccgagttatgcacgcttgcacgtttgatcctatttcatagctgcgtgtggcagtgacttcgtcctcatgacgacaaaggacaacggtgacgacgaccagttcaacactcagaacccgggagttttcatgggcatggggtcgaacaatcaggcgcaactgggcgatgcctctaacaagaaccagtgggttccacagcttctcaacaacgacagcccggacatcaccatcgtacgtcaaaggatacctatttgatcgaagtgtggttctagtgtgcttaacttactgtgtggtgctacagtcagagaacaccaccattgaggatccttcggagttcttgcttggtcgtgacatcacccagctcgccgctggcagatctcactctgtcgctattgttgcagggtaaagtgacacgacatcatcgtatctgacgagcaaacatggggctaactggggtttcatgtgtgtttactgctttaggacgaagggaatttggacgtggggctttggcgatcgcggtatgactcgtgtgatttcaagcatttctacaactaggagcttacgaacgggttgtgcatgtcgattcaggtcaaattggccacccgaagccggcacctcccccgggccagtccaagttcttccgctcgcagttccgcgttcctcgccctcgctttgtccaggttcgtgttcttcttcacgctgtgtcctggatctgtcggggttgcaagattgaccaattcactgcttgatcttcaggcattcaagaacgatgcggtcaagttcgtcgcgtgcggcggccagcacacgcttgtacttcttcaggacggacgcctgtttgctatgggcgacaacgagttcggccagctcggtgtgaagcgcggcgaaacgcccgaggagaactgcgtgaatgtccctgtgcacgtcgccgcctttggttctgacaagagcatcaagcaaatcggctgcggcgacgagttctcgatggcgctcacgaccacgggcgacgtgtactcgtggggtcgcggccagctgggtcagctgggcctgggcgagtcgaagtccgacccgttggacacgcccacgaaggtacccgacctcccggccatccagaagctggcagtcggtatcaaccaagtcttcgccatcgagttcactaacggtacgtgcctgtctatcaaccgaaccaaatccgacatcaactgacactccccattccttccttgtctgtagtgacgctcccgcctcctatcgtccgtgcggcccccaaacgcggccgtaagggtggacccgccgccaagaccaagaaagctagaaagtaaacatgcatacgcacccggagcaagagaatacaccacacaagcgagatagctactgtagctacaacaatttgtcttgacttcaaagcacacacacacgcacatgcgtttcgacttcaagcacacgaaaaagtttgcgaaatgattgcgccctttggccaaaagctcagtatcatagttggcataacgcacgtcggcccctccccctcttatccgccctgcgcgtcgcaccgtggagcgtgatgaacccccagcagcagcactacgccacgtacaacccccaacagcagcagcagcagcagcagcagcagttctatgggggcgcctacgccacgcagagcggcatgagcgcgccgaccatgggcggcgccccgccgctccacgcgtggacgccgccctcgccccaggagcagcaatactacgacatgttgttcgcccgcgtggacgaccagcggcgcaacgccatcgccggccagcaggcggtcgcgttcttcacgcgctcgcacctggacaaggccattctacgtgaggtatcagctagtcgctggagggggtagagtggctcggtggagcgactaacttactgtgtgtttggctgcaactactgtaggtatggagcatcgcggacacgcagcggaggagtgagctgtccaggaacgagttctacgtggccatgaggctcatcagcttggcgcagcgcggagagcaggtgtcggtgcagaagttcctccagtttgcggccatgcagtacccactgcctatgttggaaggggtgccgccaccgcagggaggcatgcagcagatgcagcagccggccctggttcaggctcaagctcaggctcagcagcaggactttggctctgtgcaccaacagcctccagcgagcaatggcgctgcgtacgctgttactgcggacgagaaaagcaagtatgatattgtattccagcagtacgacacggatcgtgatggattcctgatgggaccggaggcggtggcgctgtttcaaatgtctgggctcgatcgcaatgtacgtgttgctggggtcctttgttggaatattgtgtggacgtgctgattgtgaatgtggtcgataggcactgcgcgatatttggtccatggccgatgtcacgcaggatagcaagctgagcgtgcaggagttttacgtggcaatgcacttgatcgtgtgtgtgagcaagcgcggactaccgatgccgcagacgctaccgcgggagcttggagagacggcatttggcgcaggtgggggctctcaaagtatgcctgggcaggacgctttcgcttctcagatgccagggccttcgtcccagaatggatttggcgtacagcagcagcagcagcaagaaagcgtgccacctccgaagcctgagggtatgtcggcttttgactcgctcgcaacggttgaggatgcaccgctgccaagtttggctacgtcgacaccgcgctcttcacggactaactcgttcaatcacaccgatgctagcacaagtaacagtcacacagcagggtttggcgagcagtccgctcccactcctgctgggagccttcacgcagggtttgcagctcctacaggacaacaggattttggcagcttttcagcgtcacggactcccagcatcacgagtggtgcaggccgagaccgtacaaactcggcttcttcgatgagttccatgtccagtttcagtggtatggctccgcttccgcctcagcaacagtcgcaccaactccctcctcgaaacctagggagcaacgaacgtatccagatgccgctaggcgacaatgctgggttcccaccaccctcacagaactacgcaagctttggtgctggaagctttggtgcacctcaagcgccggtcgctgctccagagaagccgttcatgggagacgaggaggagaagagggtggtgggtcagctggaccagctgaacaacgaagctgttcagactctcgccagtgtggagcgcaagcagacagctatagaggtgctttccgataagctgcgcgatctcgacgagctccgccatgaactggtcactttggtgatgaagcgagaggacctgcgtgcgtcatcggctcctggatcggcggctgacaacgccgcggaggagcagactaggcgcgctgtggaacgcagtctccgagggctagtcgagaaccagaagcagttgatccagcagcttcagtgcgatatttcaaggcacgaaggtgaactggaggaagccatattgagcgcaaagttacagcagaagctgtcactagagtcaagatctccgctgatcgacgcagcatctccacctccttctactcgtgaatcttttggaggatctggcactggtggagctaatgcattcgcagccgctccgctctcgcttgacgggccaaatgcgttgccatctccgctggtgacgccgagtgctccttccgtatccgccttctcgcccgatgcaacggacagcagcggattcaacgcgtttagcaacttcgactcggcaccgcgatccattccaagtgctgcgctgtcaccggcagcggctgtacctgttccatcaagctctccgttctcgccgtctccttccccatcacagagtgacgcctttggtgattttgccgcgccgccatctactgacgcagcaccttctcctgcggctgacaccactgggaggtcaccgttttcgcccgtgccctcgcctgccgctgctgcgagtgaaagcaatgagttccaagggttcgcatcagccccagcttcggttgacggcgctgttccggcgtcatcccctgcaggagcgagcgacaccgcagctaactcgccgttctcaccattctcgccctcgccctcgcctgctgcaacggatgacagcaactttggtggttttagcgccgcaccggcctcttcaccttcggcggccattgaagttcctggaaactccccgttttcacctgtgccttccccagctgcagctaccgttgacgccacggccccgtcgtcctctggttttgaaagttctccattctcgccatccccgtcgccagcggccacggatagctccgcattcggaggctttgaggctgctccaccttctggtgataatgcaacgacgccggcgaaggcggatgatggtactgcgaatttgattttctctccggtcgctgcggacaacaacggatcaagcgggttcggcgacttcagcgctgctgctacgagcgctgaaagtgctgagtcagcagcagcttctgaaccagcaacaggcaacttgctgttttcacctgagccttctcctgcggcagccacgggaaacagtgaatcgaatgcattcggcgatttcagtaccagcgctgtgacgtcgtctgagccggcagtctcttctcaacctgcgactggcaacttactgttctcccccgagccttctcctgcagcagcaactggaagtagcggattcgactcgttcggtgacttcggtgctgcctctgcgtccaccgacaacaccgcgtcggctcccgtagctgaaaaatcgtctggaaactcgccgttctcgcccgtcgccgcggagagcagcgacttcaacgggtttggcgacttcagctcagcttcagcttcagccgacaccacctcgacgacggggaagccagcggagacgtcgggtaactcgccgttctcaccagttgccaaggacgacgccggatcaagtttcgaggtgttcggcgacttcaacgccgccccagcctcaacagacgctgcggctgagccagcaaagacggcgagtgccagcggaaactctccgttctcgcctgtagcggccgacagcagcgggctcggcgacttcagctcgacgaccgaaagcgctgcaactccgtccgagtccaagccggacaacggtgggttcgaggcgttcggcgacttcagtgcggctccagcgtcatcggacagcgccaactcagcagcagcgaaggattcgagcgacagcaatggcttcgggggcttcggagactttagcgccgctccatcgtccacatctgcggcctcggacggcttgggcgactttggcagcttcaactaacttttttcaaaaaagtaaactctaaaaagcactttttacaaaacgcgttttttatccgattcacacgttgaagcgaagcgtcgtccgcactgccgagccaggatccgacgccatggtgagcgcccccgaggcgctacgctgcgccatccgcgatgggatcctcgagaggaaggtgcgcagatgccgtgagcctaccctcgcgcaaccgcgcgggcatttacgtgcctagaagccgagatatcgctaaaatactgccccaatatggatactttatccttttttcatgtttttacttaacttgcagcgacgcgcaggctactggaccaagcggcagttcgtgctgaccccgacgcacttgatgtacttcgactcgctcgaggccaaggagccggccaactcgttcgcgaccatggagatcatggccgtccagaagagccccagcgacccgcagcagcgcgtgttcacgctcgtgctgttcaagaagaagaaggactatagggccaagaacacagaggagagggacgcctggatggaggcgctggagtctgttgcagggatgaagggaacggggatcgcttccgttccagctcccgtcaagacaccagaagaccctgctgttgcggagactatggagagggagagccggggcgatagggacagtgggaacaatgttcaagatgtcaaggacgtggatctacgcgcgctctgtgagcagatgaagaagtcgatttcgtggcagatccagatcagcaagtcgttctcggccaaagacgtcgcggagtttgtgaagaagacgctgccgcatctgacgacgaagcagatccaggaagttggccaaggattgattgatcagaagctgatcatccctttgaagtcgcatatctttgatgtggcggacccggggaggtttaagtttgtggaagctgcggcgccgaagcagccgaagaatcacttgaatatgcgaggtccttctattgcgaacctcatgggcaacgaccagttcaatgcaagcaagtacactgaagatttcctgcgcaagcactcgccgcagaagattgactcgcactgtaaaaagcttgtcgctcagaaggttgataacttattggaggagttgtggtgtatgacatttgatctcatgcgtggtctgcgcatgttgatgtaggaaaacacaatcgaggagctgaaggaggagatcagcgcgaactacacctccttcattcgagcagcggacgagattaagactatggaaaatagtgtatcgcagttgaaggcgttagtgttggagtgcaggcgaactatgcacaccttaaaaggtgtggcactggaagcccctccaggtgaggaaccaaagctttgctcgtatgagtttgtgctgatactaaactttatcttgtgattgtctggtactcagaaaaagtagcgcagcccgactttaaagccgtcgacaagaaagctgaagagcggaaacatagcatggctctggatgaatttattcgcgacctggaggtgtacctttacgaacgaaactacgagcaattcacacaccatatgctcgagtacaagcgcaaggagacgaaagggatcgagtcagctacagaggcacagcaagcgaaagtaagtacccatagcgttatcaggattgcttgtctttttccactctaataaatctgaacgctgctctgccttcgatccacagatcgatgagctccggcatttgctcgttgaaaagctggtcgatgagtttaattcgtcgttgcagacgtcggagcgtatgcacaagaaagaaaaccatctagagtttttgattcagcttggcgagactcaactggcaacagaaatgtgtcttcaaaactactcggtccggattgcgcttcagctacgccacgtgccgtcgtacggaaacgctctcaactacgtcatcaacttctcgcgaacttttttcacctcgctgcttgtatgctacgaggactatgaacataggtacgagatgtcaatctacactccagttttatgaagaggtcctaatgtcgttcgtgctataattcgttgcagctttcgtggacagaagagctcccattttatatccttgaccgtgtggatttctgcccagctagagcattttgcaagcgaaatcacgtatcacattttcccagatgatccgagtgcttcctcatctcgaagctcgtcagctgtggcgggcgcgtcctcgtcagcaagttgtgtggcgattgatgtctcggaatttaagagtgtcgcgaagtacgtgtcgagtgctctacgctacgtattttacggctcgcgacaactggagctggcaggattaccaaccgcacattatctagccccacacctggcacgtggtctggtatcctttttcacgagctattgcatagctatcaagaatacaatacgagaagagatcaagcgcgagcggtgggaaatgacgtcacggatgattcgcgatcccgagaacaaagtggagcgtgaaattatccttacgcagagtgcgcgatcattttacacgcttgtgcagcaatttttgcgagacgtccaacgcgtgatgaatccctcctgtgctacctccaagtacgaaactctgcgagggttgtcattgaggcgttatgataatatggtaactaacatatatttgttcttgtggtgcagccttgcagaggttcacggggttgtcgtgtgggaagcggatgagttgctcattcgctacagttttgaagagcttcagtacttagaatcaccgaagttatcgtcttcgttgcggccgaagcatatcatcggtatcctcacaaatgctgcgtacattcaggacgactgcgctgcgcgatccaccaatattcttcaggagtatttgcctaaggctgcgcttcaaaacagagaggtggatactcaggtaagcggctcatgtgggttagcggtttgcagggttagcatcggcgacagcactgacctattgttatacatgcacctagaacgctgctgtttgggacaaactcgtggcaattggcgtcaagcgctgcgcgcagtccctgatgaaaatgtccttcaattggcaagagctggatctagccgacgacattcttcccgacatttcggcctcgcccgaggcagctccgaccagctcattattcgctggtgtcgtggtgaaagaactcgcagattctttggcaaacaaccagctgaacaaagccgtccaaaactacaatccagcggctacggtgcccaatggtgaggacactgggaaggacattgggaaagcaccgtttgcagccatggtactcggtgcactatttcgtgagatgctggacgatgaaccgtggtggcaaaacttcggtggcaagggtggattcgcacgcaaacggctcggttacggcggagtaaacaagtttttggccgagatcaatgtgcttctggatatcgttccgcctaatcgaggtttgaaacagttggtcaccgatgttgactccaagatgcttgcgctctaccagcagcttcatcctggcaagaaagacgtacgcgctccagccgaatggacccaagcgtacacgaagcgatgtattggggcagccacgcccgtgcctgcaactcaataaattaaagaatggtatgatacagaagttaccaagtcattttcgtccacttttagtgagctttccgcgttaggttagttgaaggggacagcaacgtgttttgcgagagctgtcatcagaacggaggtgggagttttactcacgttcgagttagagttggacgtgcgcaacgcctggaggactgtggcttcgcgttcttggtgatcctaaaatcggtctacagtagtagacagagcacgtagtaggtctgatcccaacggtcgttttacgggacgaatgaaaatgctacagctagctcaagctaaggctaaaacgagcctctggacatgccatgagagcgttcatttcgagtttgacaacacaagacttagctggacggtgttatcaactggggttaaccatggggagcgaccttcacggtcttccgctccggaaggccctagtcatggtggttaacctggcttccacagtactcaccttgatggcgggtctgcgcgagaacccctttatcgtgctgatcaccgggcgctacgacgagatgcgagcgcggttgatggagagacgcatcaactacaacctcgttcgagacgacttcctcgaggtcgacacgctcaccaacttgactcgagtgggggagagtttccgcttcttctcggcgccaacccgcagtccggacaacctcggggaggaccgaagcacgtgtctgcgcgtgaactccatcaacgtgacacttccacagcatctcggccccaagctgcgacgtcatcaacttcactccggaatgggtcgacgagtgtgtcaccacccatgacaactcaaccgacgactgctaccgctacatcctcgacaattttgtagacctgaaagacattcgagcgatccagaacggcatcccaggagactttggccgacctggtgtgcccttcctgcgctgtactggtcgtccgcctgtgccgttcatgtacatcacggacttgatggtgcaccagtcgttttgggcgggaggcagctaccacgtccagttcgagagcagcaagtgccttgcagtgccgagacttctcaaccctgatatgaactacggcctcttccagacggagccaatggaccaacaagccgaggtcaaggtaacacaggctggttcactctgctcgtgacctactcgtacggcgtcgtcacgttggtcctcgttgcgcgaggtgtcatcaacgctctggccaagctccgcgtcgtcaactacgtaccgtccaagttgcgctttgctggggctagaagatactttcgttatattattccactgatgaatctgtccgtctggacatcggacgacgagaactcaatcatccgattcaagggcaaagtgatcatggcgtcggacgtctggatcaaccactggctctacatattactgagcattctggacgcgctcgtaagtatgcgcatgacctatagcgtctacgagatgggacaatggatgctctccatgcacattaccatggataactttatcttcatggcctcagctctcacgcggctcacgtggctcatgtgctttgtccacacagtggtgaggctgacactcaaattggcggttcgttcactgaaaggcatcaagttgattcgtccacaccaccagcaaactatcgagtggtacatcgactcgagcgcgctctttgtcagctacaaggtttacagtctgatgctgtgcttcttgctgtacgtgctgctcaaagttcgcggggagacgtccttcatggtaaacgccccgaattccagtcgcgggatctttggcggagctccgtcgatcgagaacttctggaacagtgagatcatgatcgacttcgtcgtgctcctttcgctcatgatgctcggaggcggcttctttggctttgtcatgttgctgactccgtacaagcgggtggccaacaacaaagttgtgtagttgatccagaaacgctatgtgtttgttggatgggaccttagtgcagtgctggactcgctcggtatcgaccccttcgacgagacgctcgtgaaaaatgaagtggcctcgactagctgtccgcttgggtgtattcttcagcaactgtaccagtcaggaccgagcggccatgttacgctggtagcggattatattttccacgggagtgggttctcgacgcctccggtggagttcagcttccctattcggaaggccatggcgatgggtttgatgcggggagataaatccacgcagtctcatgtcagcacggccaacacgaaagtgggcgcgagctcgaagtacgcggtgtcggatgtaactgcgaaccacagcataaagtcgtctggagcggtggggcatgacggcgaagatgacgacatgtccgagatgctgtacaccgacagcaagagtttgttcggtaaaaacctccgtcgttttgccaagacgacgtacgggcgggtgattctcgtcgaccaagacaagcctggcaagtgcggcaagaacgctgctggcatgctgcagtacatcgcttcagacgcgcttgcttcgatgaacatcatatcaagcacttgctcaacggcacaaagaacctcacggtcagctaagagaggcgactacgatgataaaacgttagagcaaactccagctgcagaaggcgtgggttagacgattattattcatagatgcctactacattgaaagcaaaaagtatctattcagttgcgttggtgggtcatcgcagatgtgaagtcgatcgagtcgtagtgctaaggacatgaattcatgcacagtggatcagaacatgaagatcagggctgggatgctacgtcgccccttgcaacgctatattgatgtcgggcaccgtggctatggtcacaacctaactggcttgctaaccaagtatttaaagtgcagcgcaaacacgggtagcccctgaagcttttgctaaggagctatcaggagtcttatacgttatctttagtatctttagtgctcgagcctcatttctccgcctgatgcacgattccacgtagccaacggctccaagtggtcatcaggttgccaagatgttggtcgcaaaggcttggaacctcgtggttagctttgacgggttgaaccaaccatttcccttttgaactcctcctcaacaagaaccaagcagcttcgaagtcgaacaccgcgcagtaagaaatgatgaacaccagctctggcgcagctcacgaacacaagtgtctcggcgagtgcaagggctccaacgaggagtgtttccactcgtccaagtcgatccagcacctgctcaacaacaacaagaagtggcgcgaggagctcgtgaagcgcgatgcctcgctcttcgaccggctatcggagggccagcacccgccctacctgtggatcgggtgctcggactcgcgcgtccccgctgaagagatcacggggctggaccccggtgagatgttctgccaccgcaacgtggccaacctcgtggtgaccaacgacatcaacgtgctctccgttgtacagtacgcagtcgagtcgctcaaggtcaaggacatcattgtgtgcggccactacggctgcggcggtgtcaaggcggccatggagaacaagcacattggaatcttggacacttggctgcgcaccgtccgcgacgttcaccgcaagcacaaggaggagcttgacgctctaccgacggacgaggcccgttaccgtcgcacggtggagctcaatgtcaagcagcagtgcctcaacatcttcaagatgaacgtggtgcagcaccgtcttggccgtcccgaccagccgaacatccatggcctcgtgtacgacatccacactggcgggttgaaggagctcaaggtcgactactgcggatacttcgccaagctcgtgggcaccgacagtctccacgcctacccggacggagaggagaccatggggctggctcaccgccgtcgtaacgccattctagacctggccgacggtctcgagaaggaaccgggcatgatccgcacgcgctacatggctcgcatgctcaagagggagtcggatctgttcacgcctgaagaagtggacgaagccatcgaggcgatcaaagcccagatggacgaccccaatagctccttcatgaacatcaaagacctcatcgcacacttcgcgcccatgaaggcgaaggaaactgcgtagggcgacgaattggctgtcttgcaatctgcatatccaagtattaccagcacttcaccctaagtttatcaacaatgcacaaatgaacttgctatcgccctactaagcagcactctggtgaccagggagcccaccggtagttttagtcgtctaatccagcgaaacggatgcgaaggtgtcggcatttttggtgaagtcagggtcgtttcttcatgcgcaagaccatgggaagccgttgccggtgaaggaggagaaggcttgcaacccccactagcagctcattccggctttggactgctatcgagcacccccacccaagcccaaccaccccaccaccaactccaactccgacacaatgggcgatgaccgtaagaaggacgaccactgcgactgcactggccacggtcgtgactcgcactcgctcagccacttgctcgagaacaaccgcaagtggcgtgacaacgtcctgcagcgagacccgacgttcttcgagcggacggccaaggcgcagtctccccggtacctctggatcggatgctcggactctcgagtccccgccgaagagatcacgggactcaaccccggcgagatgttcgtgcaccgcaacgtggccaacctggtcgtgagcaacgacatcaactcgctgtcggtcgtgcagttctcggtcgagaagctcaaggtcagcgacatcatcgtctgcggtcactacggctgcggaggcgtcaccgccgcgctcaagaacgcgcagatcggtctgctggacaactggctgcgtaacatccgagacgtctgccgtacgcacaaggaggagctgtcgcagtacaagacggacgaggagcgcgagcgccgcctcgtggagctcaacatccaggagcagtgcctcaacatcttcaagatcaacatggtgcagcgtcgcatggggctctacggcgcgccgcgcatccacggcatggtgtacgacatccgctcgggcgtcctgaaagagctcgaggtcgactaccacgccttcatcgccaagaacatgggcgtcttccgcctgcacaacttccgcgatggcaagatccccaccaccaagcccgagttccagcgcaacatgatcatgaacctggtggaggaccacgaagaggagccgggcacggttagcgtccgctacatctcgcgcatgctcaagcgagagaccgagctcttctcggaggaggaggtggacaccgctctgaaaacggtccaggcgcagtcgaaggagccggcgagtgccttcgtcgaggtgaacgcgctcgtctcgtacttcgctggcgacgagtccaaggcgtagctgctctatccaccggacgagctcaactgtgtgtagctcgctcaaaactaatcatcaatcaaccaacacaataccttctgagctcctcgtgtgttgcagtactttctcgatcagttgggggactcggtcattgatcgtcggtaggtccttgggaagaagagaacttcgtgggccaagcattccaccgagaaaggccgcggacctcttcgccttgtcaagaagaccgcaagacagacagtcaagtgagctcctcgcgatgcaagcaaacgcgtgtgctcgctctgttcagctggcgcatcaagtggcgaacgcgctgtcggaggtgtgctgcttcacggcgaagaagaagaagcgtagtccacgagacgagtttaaggtctccagaggagcgccacgtcgaggcgacttggagtggggcgccttttcttcttctgctgcagctgaggatgatgacgatggcgagccaggaagcggcgacgaggacgtgctcacttcccttggggcgtcgtatcgagcgtggcgcgcctacagcagagagaagagagcgcacgactacaccaagagcaggctcgtcgacttcatcaagcgagaaacagcgctcaccaagcaactggcgcgtgttggagggtctgcggaaggcatcgagcgcgcgctgatgaaactggaagacctggagtccgccgtggtcgtcttggaggagagatacgacgctgcggtcactggtcaagcagcacgcgaagacctcgcgcttgagcttgaagcggtgcaacggcagtgccaagtgcacaccgatcgtctccatgaagccgaagccgccgcgtcgcgctggaagtcgcagtaccaactagcactgccggagctggcgtgtagcaacttggagaaggagcagctggctggagagctccggaaggtgaaaaagacggcggtgctgctgctcaatcggcagtacgttcagctcaagaccatgcgcaaagccccgcattccactcgattccatgaagacgaaaccaaggcgcgctcgttcaacaacgtggacgtcatctaaacaccgctcgacactcgtacagacgatgatcagtgaagccgcaacgttctcgcgacgcagtcagctcttcgagatgccatttccaagtcgtcgacgctgcatttgtacagattctagcaagctctaccattggcacgaagatcaatagcaagcacaagttgacttgatcatataaattaggcaagcacgaggcagtgctttgtgcgtaccaagctccgccaaaagataacttacacctgctttctcaggattccagggtctgcagtagtgcattcgctgtcgcttgttcatctccatcgcaggattcatacataacttctacaaggtctcgagcaaagcccatttcagtgagctgcatgtacacaacaccatggaggagttaaggttagcaatttgagagtagaattgattcaagaacccactgttcctcacccgatcgatggcaccgctcgcttcccctctcggtgcgtcttcccaacccatagcttcaacatcaataacttcttctccaccaactttcggttgctctgccgtcaaagaaggcgtccgggtggaaaccggcagcgacaagagccgcagcgtcgccaccgggttctcgttgagctggttgagcgtctcagacgagaactgctccttcaacagcgttagcgcctggaacgaatctgtcgccgccagctcacggagcgtcgtcatgctctcgtcatgcactaagctccgtagcggggcaatcgatgggtgtgttgccaccacatcgggctccttctcgtcctccatcggccccttcccactaactctcccttctgccagcaacgccgcagcgtccaggaggttgttgccgctctgtcgcagcgcctgagccgccagctcggacgagaagcccatgtccacgagctgagaccacaagacctcgaaggtggcggcgtctgcctcacccggttgcctttcactgccagaggccggtccaccgccggactgcggtgcgtctactgcaaacacgaagaagtccgaggggcacaaggcgttcaggtccacgacgtccgcgtccgccagaatttggccgcgcagcagcacgaagcactcctccaggttggaagcctgtgggttatgcagacgctgccgctgctgcagcacgagctgcttgagctcagctaccaggacgctgtgctcgtcggcgccgtggcgctccacgagcagctcgcggccgtcgtccacgcagcgcacccgcagcaccagcataccggtatcaagtgtccgccccgctcggatgagtgggtgatgtggagcacatcagtgtgactcatctgaaccgtttttctgactggattggagtcagtccaaactgcaacatcggggcgatgagggcgccaaggacaagcacagcgagcccccgaaggcagtttcgaccgatatggagtgctctgccgtgaagagaaggctgccttcatggtgattcttgcttgctggtccaacgcattggcagtgcgttgactgtggcaatgcctgctaggtgttgaaaccgtagaatgtagccatcggagccgaataagattcgacagtaggaccacgtacgtgttccgatattgtcgccaagccggggatccctcctgcgtcatgcagactgcacgacggatgcaatgcagctatgctgaggtaagcttagtgttatggtggcggcgcatttattagcacttgttgcattatagtttacttcgtgggtgcgaggagaagggggcgtgggcgacgcggcgatgacattctgcttgctttggcgtggctggcttggctgacttgccttggcgtttgagctggttgcggcttcccgagcttggacaggcgatttgccatccatgtctgctgcgcttgggctctgcttggtgcaccccgctgacccgaccgacccacgctcttcttcctccttgcaccgtactccatggggtcgtggcctcgtccagggagttgtggaaagagaaacatgcagagacgaagacaaaaactctaactaaccacggggccgagggtggggacgggatgggatggagggaggagactgtcaattactcaaagagctgccggaccggcggcggcggcgggaggcactgcgtgggcacggcgcggtcgatggacggcaccgtgagcgcgaacgtgcgcgcgagtgtcctgccgggcgccacgttggccatgcacttctgcatgaactcgtcgtactgcatgtactggagccgctcctgcaggtggccgtactggatgagcgagttgggcgccagcagcacgtggtcgcagcggccgccgcccagctgggccaggtagccgatgatgtcgctcatgacggacttgggcgagacgctgcctcgcggctccgagaaccaccgcgggtgaccgtcggcctgcgcgttggccgcctgcacgaactcctcgagcgcctcggtgtcccagctgaagaggatggccgggttgtggtccgtcacggtgatgccggccaggtacgcctcgatcttggacgcgagctcggcgtcgggcagcgagaagttctcaaggtagtcggggcctgaagggctgctgtttcctgtggatcatagcgttgcgtagcgttagcacctcggtgtctaccaaccagccatgccaatgcagtgctgtagcgcctaccgttgggctgcatggcacttctgtggtggtgcggtggttggtgggggtgaggtggtctctgttgagctttatctgctgtctgcttactgctgcgtccgaggaagcgagaatgcgcttcgggcttttggtcgggacggagcggatcgaagaatgacggggaaggcggagagcgcgcactgccttgcctgcctgccccagcccccggtgtggatggtttcggagagggggagccggcggcgaggaagcccggagcacacgtcacacgcgattcagcatgccgcttggagggttcagcaacaatccggtgtttcgagcgcagagaccgcgtgaatttggcagcgctcgggccgtgacgcgccccgtgttaggtcgtcttccagaaaaatgagccgcaaagctgcaagaagtggccggtggggcggaccaacgccctcgtcaaccagtgcaaccacatgtacatacaacagtacagtgaagagcgagcaccttggctccggcccaatggaggccacggtcacctttatgtcacgcccggcagcgactcgtttgacaaacgcgtgtgcccgtcgagtgtgtgggctagagacccgctccggccgcggtctggtcagtgctgtgcagttcgctgcacagcggcgagctggacgcagcgcgctcgtcctcggcgccggccggccggagcttcccgttggcggcctcctccatcatggagtccatgggccccatgcaaaaaggacgcggcgaatgtgtgcgcagccatccgcccaaagacaagaggacaccgagacggttgagctgaagccacagctcgcggcggtggtgaagctggagctgcaccggcgagaagctctcgggaccgttgtcgcgtcgcgcgcgggcacttgaactgcagccgttggggccagcatcgtcatgccacgacggccttctacgtgggacgcttgcgtcctcgagccatggactccggctcatttcccacagcaggaccaaggcgcgcacatgtggccgagagacgcctcacgcgccttatctggtcaactgaccgaccgccggtcggcgaccgggtaagacagcgcgcgttgatggcgaatcgtggcgtcgttgaccgcaaccaacgcggcacagctccagtggagctaatgcctggatcgagttgcagctaagtggccaagtcaaaaaaagtatctttcgggaacgtacaacttcaactgtaacaactgcaagcaaaaagcgcggctctgtgctctggttggctcgatacaagctctagatgccggtccgcgtcgaatatggaaagcaggacacacacttcgagggaaattcaagcgaggagggccaaacagcaagcgcctgctgccaggcgactggatttgccccccccgcggttcaacgccgccgccgccgatcattactgccaaccgaagacgtgaaaaagttgccccgcaccaaaatgatgcaagtacattgcgaagctcgagcggtcgacgagattggcgctggctgcagtcgctggacttatcagccagcgagggtcaggctggttgcggctggtgtcctggttgacacgttgtggcggcggagtaagaatgtggtcagtcggctccaaggttctcgttgaatctgccgtgttggatcctccgtgggccacggaccgtctgggcgggcaggtaggtcgtcttgcactctacggcggatgccgcggatggaacttcagcgggggaggcccatgcaccgcagggtattgaccttgagcggtttcgacggcagttgtcctcaagccatgtcgatgttgaaggttgattgtcgataccttttggcaaccgctcgctcaaaactgcagaaacagcattcgagtcccgtaaattctatcatagaacgctgtagctcaacgcggaccagtttccggggcttccatggccgcctatagcacgtgcgttgctgatttagcagcagcgaagacgcctccagcggctgggacatctagcttgatggacagttctccggcgccaacaagtcgacctcgcgacatcaccccgagccaatcggcgaatcgatcatgtggcgaccaaagtcgctcttgatgcagtgacgctgagctcggccggcggaaaagactctgctagagaggctgagcgatttgcaaggcaggtgtgccgtcaataagctctgctgaggcgagtgcccgtcaacgcggatgatcccagcctggttcagctgtcagtcgttcattgacgacgggtacggggtcagttaaggctagtgtcgccgtgaccgagctctgttgacggcgcagtcatcactggtgtcctgcagtcctgcagctgctagtgtccgcgagcgtctcgcagtccacgaacccattagctccgggtggaagcggtgaaaattgcttgggagtgcatcgattggttttgtgctctgcggctgcagtgtggccagcgcgccagagcatgtgaatcgaaggccaaggatcggcgcaacgatcaagcagtgcagccgcagcagtgtccaattcggtcgtggataagcgctgtcggtgctgattgaaactcaagaacgtcgggcccatccgctgccgcgttactacttgacgccattcccaattgcattgcaagcgtgcagcatgtagcgcttcgccgcgttgcctacatcacggcatcacacgaaagagcagcgttgcccacaactcgcagcgttacagcgaccccatcacgtgcattgttgacgcggtgcgttgttcacgacacacaatgcatttggctacgagttgcagcgagtgctgtggaggccaacacatgtagcgaaggcactgcatcgagatttgagctgcgtgttggggctgttacacgccgcggtgtgtaacctcaacctgctggggagcggcagcgcgaaagcgagatggctcttgtgttggcaaaaggggcaaggcgcctcgcttggaacgaggggcccggattgctctgctcggtctggcaagaagaaggtgcgttgagcgttgagcgctgcttgcaagcgtatcaatctgtgacgtggtacaaaatgtggtccacatggctgctcttgaaggggcacgtgaactgcagcggcgactcgtttgacggccaagaagatcgtgttctgttaacatggctagcgtggcaggatacggccaacaatagcagcagcagttgctgcagttgctgccagcaacctgatcaacagcacccctgctcaactgcagcgccttggtgcatgcatgcacatgtgcaggtagtgcattgcgctcttctcgcaattttcctgccagctactgtagactgagaaccgtgacatttcgtgcgagtggccgccgggaaggttcccgagcagggctttgaggagcaggcggcacctcactggatcgcgcgatctcatttttgaatggcccgcagccacggcttcgtccatatctgaagctgaagcggcgcggcgtcgcactgcaacgttctcgcggggctcgcttgagccgcgccgcacccagctgcgactgcctgtcgccggccagccggtcggccaggatccatgcaggatcgatcgatcgctgcggcaggcgtgcgcgagggcattgcctgaaacagcggccatggtaatcagcggcgtgcgctccgtatcgccaaattagcgctgatttacatccaatcggctgcgcttttcagttctaaatgagcaacagcagctgcaacaatttcgtgtggtccaccccttttctcctcatccagcaaccttactctctccaaactccgtttcactatcgagctcgtctcagttgtcgctacagggtccgcgccctttcggtgcaagttcgcacttagtgcatagtccaccttgaagcaaatcccatcggtctcacctccgagactcgatctcagtctccgctctatcctcgatacaaacgctgttatcccgcacctgtgtcataagcatactccgcttcctcgcaggctcctgcaccatccccgtcccaacccagcgcctccgatcgatgtcctcattcttgaacagacgctctgaggcgcaagtcgactgcaacacgctgcaacaccccaattgaagcccgtcgtaccatgaccgagaacgtctcgctgaagctgagctatgcgggcgagacccaccgcgtgacggtgccgctgcgctccgaggacctcaaggcgcgcgtgctgagctacgagctggtgctggacacggtgcgcgagctgttcccgcggctggcgggccgctgctggacgctcgtgtaccgcgacgaggagggcgacgtcgtgacgctgtcgcacgcgctcgagttcgacgaggcgtgccacgtgctgctgagcatgagcgcgctgtgcgccggcgaccagcagctgcccacgctgcacttctgcgtgctggcgcgcgtctcgttccgcgagaaggtggtggcgcccgtgctgcagaaggtcgtggagctcgcgcgcctggcccgcgaggccaccaacacgctgcgcaacagcgagctgctgggcaagggccgcgactcgttcgtgcgactcgcgggcggcgccgtctcgcacgccggcgcggccatcaaacacatccgcaacagcgaagtgctcgagcgcggccgcgagtcgctattatcggcgcgctcgggcgtcagcacgcgcctgcgacgcgccagcacggcggttgcagcgggcatcgagcgccgccggtccgccagcggttccgcgtacgacccagtgagcgcgttcgacccgacggaattcgtcaagccttcgcctgtcgcgacgtcccagtcgctgccatcgtcggaagtggccgtgactgtggacctgcgccagtctgtttcatccgtgaccgaggcctccgcgctcctagcacaagagcaagaggagagcagcgacgaggagcccccggcactcgtccgtgccgacgcaggagagcagcagatggcctacgagtccgacgcggacactttgtgtgacgaggaggaggaccgcgagtgggacgtcgtggacaactcgagtgcggaggccatcgctgagaccgacagtcggtgggctcgtgagctggacgtgctccgggggatcatggtgcatctggacgaggagctctgctgcgacttgctggagcgctacaatggcgacgtagaggccgtgctggtggagctcacgaacatgtaaaagtaagcggcgatgcctttccatataattagcaaagtaaaagtgtgttctatcctcaatcgtccagcttgtttcattggattaacatcgctatggtatcaccgactcggtacgggtctcgtgcctggtgcacgcgtgcctccattgctgctggggatcatcgcgctcatactcatggtcgcttgcatcccgttgccttgagtcggagctcctgaagcagtagcagttgcagccttggcttggcccaaagccacactgcggcaccgcgacgcaaagttgagcgagcacagcgtctcccacgcgttccattgcacagggctcacgttcacgaacatgagcaccttcgagttgccactcagcgagtcttgcagcaagaatgtgagcttggagttgcgatacggcacgtgtttgctgttcgcaccaagcgcagcgatcacgtcacccagcgctgacagcgagcggttgatattctgcgcctcctttagtcgctggccgctggctgcagtcttgctgacacgctcggatccggccaaatcgatgagatgcagcttggaagtccgtctccgagcgtcggtcttcatgccggtctctagggtaatggacagcacgagatgagagcgactcgagtgctcgttgaagtcgtgcgagcccacactgcgatgcgagtggcccaagcgcatgagatcaagcacgtcgccctcgttgaacacttcgacctcaatcaggttctcaacgtacacgccagtcttgcccacccgcacgtccaagcctttaaccgcagctggagacgctgcccccggggcacggccaccaccttctaataagtccacgatggtctcgttgtacacctccagaatgctcagcttcagggagcactcaaagttcccggctgccatgcggtcgtcgcggattgagaagagctcacgcagcgcacggaagttcacgccgcggtcgttctctggtccctccattgtgtgcgtcttacccgatcccgtttgaccgtacgcgaagatgcagacgttgaagccgtcgagcgcactcaccaccagagcacgcgtctgctcgaacacttgctcttgtgtactgttgggctggaagacgtggtcgaactcgaacgcgtgcttctgcccgatctggttggccttatcaccagcctcactgccaacgaagagatcgaggctttcgtggtcgttttcacggaagaagacagctagtgcggactgctcgctcttgagctcaacgggctggatcggtcgaacgcgacagaagacacgaatgttgccctgtagctccatcagtcgattgtgcagcttccgtcgggccagcatctcctgagtgtagaggtccgctacgcgagccttttcttcgtttgcttggcgggcgatctcggcgctctacaagaaaacacgagcaggaagttagtacctgaatcataacacggagatcataagctagagcgcaccgcctgttgtgcctctgcaaaggcttccatgcgttccctctggatagtctgcgctacggaggagagcttcgtctcggcgctttccagcgctaacttcagtgacgcgagctcatcctccctctcctttgacaagccttgctgcgtcttgaactcgcgttccatggcgcgaaactcacgcttgagcgtgcgctgctgatcctccagctcgctgatctgcgcggcacttgtgatcttgtactcttcgaactgcttccccactgccactttctccgccatcgtagacgtcaagctgaccttcgcagcttcgagctccttccgtgtttcagccaccgagtcgccgagttgtttctgcagatcctgctcaagtgtgtccttggcttctgcttggcttgatcggagctgctcaatttcttgctgtaaggagaaggctcgagctcgctctgcctctaactctcgctccttatcagccagttgatcgccaatagccttgatcgtcgcagcggcagttgcggctgcttctgcggcggcggcaacagcctctccgttctccttctcctccgtctcacgctttctactcagatcttcttgtaatctccgaatcgtagcttgcgctgcctcaaacttcctggccattgctgactgctccttcgtagcttgctccagttgttgctccatctgagctcttgcagtctgttcgcctgaaagttgagcttgcaagctctcaacgtcctctgcctccccgcgttgcttcaactgcacctccttcagcttcgcctttgcgagagacagctcttttatcactgcctgatgctcctccaatagctcttcatgcgctttggtgctcccttccatccctgaccgagccagcgacagctccctcttgagtgtttggtttgccacgactatttcatcacgctccttcgtgcgctcctccatttgctgcgtcaaatcgcccagattctcattaacctgaccaacttcgctcttcagagcttccagcgcttggtctcgactcgccagttgtctcttcaggtcagcaacttccgtcttcatccccgtgataacctcctcgtctttcgtcttctgttcctccatctcctgcagctttctagctagctgactgtcacctctaggggtgccgttctgctgtcttccggtcgacacgggcgtactctctgagtcagcaacagggtaattcctatctccttcatctcccctcggggaatacacttgagcttgaggggctttatacggcgtctcgtagccttgatagtagccttgcgcttgtcgtcgatcccagccttgttgtgactgcgctgcgtactgcatttggcgatgatcctgctcgttctcctgccacgccactccgctctgataaccaccccctgcatcgtaatacctggctggatgtggatctcgaaacgcgtgagccttcatctgcttctgcttcatctccctgaagagctgtcggaactggtcgtcgcttggatggtcccatcgactctccccagagatctcgttgtagtagtacggctgtcccgtttcggttgctgtaacatggtaccagccgtcgggtagtggggccacgagtgactctcttgcgatccacaggaactccccatcaaccgtaggctcgatccccagtcgccgtgcatgttcctccacagccgcgtggaagagtgcggggtccgaagcctccatcatcgcagactcgtcctgtgccaggggtaaagacttgtaacttgctgcactgccgttgcctgcgtgccaagaggcagcagctcgaggtaatgcggagactgggatgccctctccactagccactcgactggtacttggagccacgtactcgtcctcctgctggaatcgcgcccgggacgacggcattttgacggggggctcactgacgtcgcctccctggaaggccaagtcgactagaggcacctgccgccccgagtaggtgacggaggagcgagccgagacgcccccgcgcggagaggactgcgctattcgagatagatgctgctcttccgccatgttatgacacttggtgaccaacggacacccaccccgatggagggacgcgatgcacgaaaacttcaaagcaggcaggaaaccaatattttagtgggggttgaggaattcaaaatattacgcagcgggtttggatagtctgcctccttcttgcaaggtttcggccttcttcttcttgtcatttgggcgttggtgggtcagaagaagcgagtggctttgatgaagtcggcgtacagtacgtagcagatggcgacgatgagcacgaagatggtcgtgtacagcacgatcgtgttggtgatgatccggcgagtcatgcgctgcaggatccgtcgcgcctcggtcgtcattgcccccgtctcgcgaacctacaggagacatgaccaggaaccatttagcaatggaagcactcccttgtaggtgacagatcctcctcggtgggtatgaaccgaccttctcgtgcgcgccgagcaaactttcacgctgctgtgcgagcgtatccagcacagcgatgccgacctcttccgtctccgcgacgatccgatgtgtatcctcaagcttcttggaagacctgcagtcaggaagcacccagagtcgttagcatctgcatgctgagttttcaacttagagctcgtcgttctcacgcgttcaatcgatcgttgttcttcatcaagcgctcgtattgcgaagtctgttcaagtagatccagcaccaacacgaaggtcaaactccgacactcatcttgcaactggagaacttcttgcagtatctaacccacctggttaactgtgctagatgccatcttgccctctcgcgccatcagctgtgctcgctccaagtcgcgaatgagtccctgcagctcgtctcggtacaaattgatctgcacataccaacaacaatcagccgttaaagaacggatacgatccgccatctttaaaggctgcatcggcacctttgtctgcatcgccttccgcaggctgggctgtctgccgcgcacttccaccgtcatgagcttcatctacagaccacaagacacagatagtcagcaggactcccattgccaatctaattgtcacggagccacagccttcgtaacccacacagcgctgagcctccaccacgcgggcctgcgcgatctgtgaggcgttggagacggcgttggctgcagaaatcgcagcgtagaggcaaagattgtccgacgttagcaaagcgtcgccgtatcaattatcactacaagaccccgcgccccagagcagagacgcgctgtagatcgcccacctccgccgcgcaggatgtcgctgatgctgttgttgatggccatcttgctgtccacgaagtccgcctccagcgacaggaactccgccgggaagtcggtcgccgccatcgcgcttggttccacttcgagctcggctgactaaataacccatttcagtggttcaggttgcttgttgagggtgagcaaaacaacttgagccacctcgcagcccggatttctatggtgttgtacagattggctcaggttgctcgttgggggtgctggtttcttcggatgaaaatctgtgccgcaaattccagatttggtaacgtttagatgcacataatcctgtacatggaccaaaatttgttttaggtttagatatgtttcagaatggatcctgaaactatttacgatcaacgtttggcacaattagactccatttttgtatccagacctcagctagcatcgaacagctttattttgtataggctccacaaatagggattcacatttcaaccaaaagtaccaactttgtggcaaatgaaggcaccaaccttttgccctgttcaacaccaagtgtacctccgcgttgaagatgcggtggcccatggaggccgtcgagtccaccaaggcggaggaccagctggtgcgtactacatgggaggaacctctgactgcaaacgcagcgctaacgagtcgatctaatgcgcacttgtaggtctggttcacgctctacctggtgatctacctggcgttctacttcttcacgagccccttcgtgggcaaccgggagctgctcaactcgtggacgccctacgtctacttctccatggtgctctacgcgtggctattctccgccgccgcattgcacacgcccgtgcacgccctgggtctgctggactccaccatcaagcaaccggtgagcagattctacccaggcacttgggacgctattgctgtcgctgttgccattgcgatactgagcccgtggtgtttgtgcactcagatctcgctgctgtttcccttcttctcggccagcttcgtgtttctcatcgtgctggaggtgctcatggtgctcttcctctcgcggatcgccaagcggctggggctgtcgtggactgtggcccacgtctcgtgcgttttcaatgccttcagattgttatatcttttgtggggtttctaatggggatttctgtgcatctgtagcttggcgcggtcgttcatgaacgtgctgcgcaatagcgccgctattagtgttgcttgtgtggcgctgatcgtgcactgcgatgccacgtacgactgcgctgcgtcgccggatgaaccgaggacgtacaacagtcacgcttgcgcacagatcttctcgttcgtccagtcggaggacgtggagactctggtgcctggcaggtaagcggcgtgtgtgtcttgctgcaattagtatgaagacgtagtgaacttacgtgctgctgctttgttgccgtgtagctatggtggcgcaattttgatctggtgcatgggaatgttcctcgccatcaccaactttttcctcgagcgcatgagcggaatgcgcatgatggtttcttttgggtggttctctaaccaggttgaagacaacgaagtggacgagttgtcagagggagagcacggccacgagcgtctgccgcccgagcaaaacctaccgatggttccctggtactccatgctcctgttcgacaccgtcttcgatctgctcatctcgctcaagatcttccttggtcgattcgacatgcgcacaatgcagcgcgcgctgcatccaaacgacgaggactactgcttcgaccacctagctgacagggacgaagtctggctggactttatggctgactgtggagacggttttaacagcagctaccagatcgcgcgtttgcttgcccagccagaactggaggtggactgcgaagtgcccgacgataagtctagcgacaccgagcaagaaagcaatgagaaaacgaagacaaaaacgatcaagcgcgtgttcccgcgcggcgacgcccttgtgatcggcggagatctcgcgtacccacacccagacagcaaaacgtacgagacgcggctgttccgatgctttgaatacgccatgaagcccccgccaagttaccacccatcggccatttccacgaggaagaaggctccagatggttgttcttcgttgcgcgactacgaaggtccaagcgtattcgcgatcccaggaaaccacgattggtttgatggtctgaacacgttcacgcggtatatctgtcaacgagactggctgggcggatggctacttccgcagaagacgagttacttcagtatcaaacttcctcatggctggtggttgtttggcgtggatctggcattagaaaacgacgtggacacggagcagtttggcttctttgagcgagtggtgcagacgcaaatgggccccaatgacgcggtgattgtgctcactcacgaaccgcgatggctcttggatgtctacgaggacaaatccaatcttgacgcgaagtttgcctaccttattgagaacgtgctcaaggggcgatgtgcagtacgacttgctggggacattcacaactacacgcgacactcgttagtggaggagacgcacacgttgaagcgcccggcctccatgcagtttgacacagcgcggcccaaaatctcgacagctaatcttccccgcaggcactcgttctcatccccagtccacaagcacttcccacacatgaagcaacacgatgatatcccgaccgaagagcgaattgccatggacgcccaagcccagtcggccccccagccggagcgtgaacgctctgccgagcatttgatcatctctggtggcggaggtgcgtttctgcaccccacgcatattcccagtccgaccctgacttcaaacggcgggacttacgaacacaagcaatgctacccaccagcgcatgtatcaaggtattgagcgctgtgcggtttgagtatcatttggtttatgctgctgactgcttgcctacttgattcctagacgatatgcagtgctgaatgtgtttggctttcgccgcatcaactggcggtttgatgcgatcggcggaatcggggtacgtaacgacaagctgaatgagctttcatcttggagttctaactaacagccttgtgtggttttgtgaatctagtattttgccatggtgttctctatgttcccgcgctgttctgttgggtccatttacgctgcagcaacgtactgggaggcagcagcacagttttgccaggagctcgtgcacatattgtacgacatggtgacgacttcgtacgtgtcgttactgtgctccattggcatgctagtggggatgatcggcttcgcggactgcacgacactgccgaagcgctgtgcgatgggtatggccgtgtcgcttttccactgcatcgcagccttcaccattctacttgtttacgagtgccttctcgaagtcgcttcggttcgcggctcgctggggcgtgagggcgagcactcgctctaccttttcttcagcagcacactgccagacttttcagcaatccgacagtacgacatattcggcctcgcgtcgctgtatgacgactttatgctactcagtatgaccatcttcgacggtaagcaagtggcttgaacttacgttgtagcctggattcttgctgtgccatgagctaacctgattatccatgctactgctcagtgccggaggtggtagcgctgcatcgcaacaagatctgcgcgtccggattcgagagccttggacgcatggagctgtggatgtactacgctagcgtctttccgtacttctgggtgctggccacgccagtagtgagcttcgtcttcggcacgtacctgtacctgtcgctcaacatcttcgggtgccactacaacgaggccttctcgtcgctgcgcattgccagctacaagaacttcctgcgcctgcacttcgacaaggagggccggctcgagatcttcgccttcggggtggacaagatgccgcgtcgctggtgcaggtacgcccaaaacacgcatcttatgcgacttcgccgttctgtgactgaccccgtgctgttatctacagggaccccaagtggagtgggggcaacggcccgcgcgcatcgctagagagggacctgccgtcgttcaagtggacgcgccccagctactggaagccgctggtgaccaaggtggataacatgctgcgcctggacttcgagaacccgtcgctggacgccaagttcaacacgacggaccgatccaacgtccacctcatcgaccgcgtgctggtgcgcaagcccgcagcgacataacgtaacgtaacgttggctccgttcgcttcaacttgacctctgttagcaatactactacggccttgtacttcctacatccaatccgtatgctccacgcacttccgccgttgaacgactccgaagctttggatcgtaccgtagttcgtagaacagacaagcaaagcgtgagccatctcgccatgtgcaagctttgtcgatcgttgccgatgatcacaccctcacactcatcgtgcgatccgtaggttcaaacgcactattgctgtagctctccaccgtcaaccccactcaggcgaacgaacctctgctgagatctgcggccattgcgctccttcacatgccgaagaaacggcgcattccccaccaacaagaagtaaggtatccaacacacttcgagcagaatgtcaaaaagaggccgcgtgacttcttctcgacgtcaaagctggtatcgtcgccttggtcaaactggaaacccctcccaatcccgtcgaggacgataaacaccggtccaaactctctcactatcttggtgacgatatttcccccgtctcatccaagcgagaaattacagcacggacgagagcggcgttcatggccccctttagagcaagctcaacggacttttgaccccgagacttcgacgcgtccacgaaaactttcggttcgatggccactctgatcgtctgactcgcacacaaagacgtcttgaagtcttggttaacaaaacctaactggggccactgcccgcggcatcgacggatgtattccatcccaaacagagtctgctcgattcggaagtcgttatccgccagagctatgggccacgtgtctgcccgaggacctgaggtgccgatgaacacagactcgtgaactcggcagagctgctcgatagcttgttgctggttgacgaaatgtagcgactggttgttcagcgagaacgaagtgtcgaccgctgctttccactctggctttggaatcttcatgagcacgtggattgtcttggacggcgaagcacctccaaatacgtggtcaatttcgacgcctgcgttcagttgtttgttcaggtacgtcttcttcactcgctcgggaatggccccacttagcagcaaatccacatcggggtccttcgacgagagccactgaccgccttccgtgacggaaggcggcgtcgttgatgcgaagcacggaagttccgtcttcgccaggaagatctgcaggttgtcgggatcgtcaacgtctttcgtttttgcggctttcttcgtcttgataaccttcttcaactcagacaccgactccttctcaccgatattcacgacgaacgctcctcaaggatgacgcacaagtacgcggcgattcttggtatgactgatcaaaactgatggttttggactttggtggatatattacagtgtttacaaccagctcacagcctagctcgctgcatgcaacgtcgaccagatccacctataatgcacaactgcggcacctccacgccctcttgatattgccgttggtcattgtgaatgacgcaccgacggcggcgtcggctttatccgggctgcacgacaccaagccgtcctctgttaggagcttgaagccgtaaacttctagttgtgctgtagtcacacaacgcgtggcttccaggcgcgtgagctcatgatacccgtccaacacgcgcgtcctcggcgacatacaacgcttcaacttccgatctcaaaacgctacaaacattccgctctacctaaacgcacaatttatccaatcgccaggcgcgatcgctcctctcttcaaccaatcacatgtatcccagaacccgaggtttttccctttaaacctcgagccacgggcgttttcacttggcttcagtatgctcgttggttggcgtgcattagcccgccagccgcgagccaggaagcccagtcattcgcgaatcggcgccgctctgcgcactagacgccatggtgaagcgcaaaaagcatgacaaggacaagtactacaacctggccaggcagcagggctaccgcgcgcgctcggccttcaagctcatccagctgaacaagaagtatgacttcctgtccacggccaaggtgtgcatcgacctgtgtgccgcgcccggcggctggtgccaggtggcggccaagtacatgccggcctcgagcatcatcctgggcatcgacctgctgcccatccgccccatccgcggcgtcaagacgttccagtgcgacatcacgaccacgcgctgccggcagatcatcaagcaggagatgcagagctggcaggccgacgtggtgctctgcgacggtgcgcccaacgtcggcgccgagtactccaaggacgcgtacgtgcagaacgagctggccctggtggcgctcaagctggcggtggacgtcatgggccgcggcggcaccttcgtgtctaaggtcttccgctcgcaggactacaacgcgctgctctgggtcttcaagcagctgttcaagaaggtgagcgccaccaagccgctgtcgtcgcgtaacgagtcggccgagatcttcgtcgtgtgcgagcagttcctggccccgcactcgatcgaccccaagctgttcgaccccaagtacgtcttcgaccaggtggacgcgcaggaaaagaccatcacgatcttccaccccaagttcggcgaccgcaagcgccaccgtgaaggtatgttgctgtctatttatctgtatattttctgcatgtatcggctgcattctctagagtctctagtggcctgtccccattggtcactagcgctacttgtagccaagagcaatatcaagcgtttccagtgcctgcacatgctgccaaccatctttcgggagggggaagctgctctttgcttgcagtttggggcgatgatctatgacatttctactctgcatgctgtgtatatcatccacggtgatccaaaagcaaagatattaactgtggttatgatggttgatcttcaggttacgatgaggctctgggcatgaccctaaccaacgagtgcagcgtgacgcaattcatcgacgcgcacgatccgatccgattactgaccgacacgaccaagatcaagttcttacccgaggacgacgtgtaccgtgaccacaaggacacgagcgatgagattgtgacgtgcttgagcgacctcaaggtatgtaccggtggatgtttggatgatattgtgccggtgacaaaactcggctggagagaaggaaatgaagatttcaaagctgaatattgtctgagccccactgttgttccggcgcctgattaatttcgggaaaacccaccggaagccagtgtgtggcgttgctgtcaactgcccttgtgcagtctgattcttctctcagccgaagccgtcactgatatcacatttatatctatgacttcgatcaagtggctaactttgactggatgtgtttacaggtgcttgggaaggccgacttcaagaacctgctgaagtggcgtacccgtatgctgaagtacaagaaggagctgctgaaggctgaaaagcccgaagatgatgatgagggagaaaagccgaaggaggagtcgaaggagcccgagcgtgagctcacagagaaagagaaggacgctctcgttcgcgaagagctgtctcagctgcgcgccaccgtgcaggccaagaaaaagcgcgagaagaaaaaggtaagcgtgtgtcgattgctgtatgtgtgtatattgcatgttgagtgcacgtgggcgcatcccagtagtccttgtcatatcttctcgtttgacatgttgcggattaaccctcccgactcccgttaagcgcccatatgaaagtcccggctccctatcctatcttcgctgctcagtgcgaatgacggtcgatttgggctggacatactcagttgggcttgtatgcttgtatgtatttatttatttggcgggaatccaaagccccttccaattccatttggtcggattggtccttgaacagaccggctattgaagccgcctacactaacttgcagccttcagctgttgaggttttccgaaccataaaactctcaaccgttcttgtgttcagacattccaagtgcactgcatgtgatgcatatccatttgaaagtgtcgttgagcttcgagctaactgttgtgattctttgaactttacaggagcgtgaacgcaagcagaagctccggattcgtgctgcactcggcatggacgctgagggcatcgacgttaccgaagctgagtcggctttcagcctgaaggacttgaagatgtccaaggacaaggtggacgacctcgacaacgtcggtgccgactcttccgacgacgaggagcttcaatttgagacttcggacgaggaagaccaggacgctggtcttgaggacagtgatgccgaatacgacgagcttcttgaggcttcgatggagaaggcgtacgagcagttcctcactcgtcgcggtgatgacgtcaaaacccgcaaggctgtaaagcgcaccaaggtcgcgaagcgtgctctcgccggcgaggctctggttcaggacagcgagatgttcgacggcgacatgaagcagtacaagcagatgatcaaccccgacgaggtatgtaccacttggatgttgctgtgtgcgcgtgtggctcccccatccgtgttatctgttccgggtcgttcagtacctttgttcagttgtcaaaaatgggggatagcaacatggattgccatcatgtctgaccgcgtctctagacccttcggggtactacggagacgtagtcctttgtgcatccgaaatgccacactcgtgcgtttacctgctcatcatgaacctcgatctaacttttgacatcatttttacagagttccgatgagagtgacgacgatgaaggagacttaaacgtgtcgctgaaggtccccgagaaggcaagcgctgcagtgtctcgctggttctcggacaacaagctgttcgacggcatcgacgacaaggaagacctgactctgcccgagatgccgaagaccgacaaggagatccgccacgccaagcgcaaggctgctatggagcgcaaggagcgccgtgctgctaagaagctcaagaaggaggagaaggagtacgagctggagtttggcactgagttcgacattgctgcgcccgctgattcggatgaggaagctgctatggcggctgaagctgacgaagagagcgatgacgaggccaatgctgagaagaagtccctgattcgctcgggtatgggcgctgctctcaagggcgatcacggttcctcggacaagttcgaggttgtggctgctggtgaggagcctgatgagaacgctctgcccgtcatggacgaccgcaagtacgactcggaccacgaagagtacgacgctgaagaccgtgccaagactctcgctctggccagcatgatggtgcagaagtcgaaggcgaaggacctgattgatgccagctacaaccgctacgcgtggaacgactcggaagctcttccggactggttcgcagacgacgaggagaaacactaccgcccgcagattcccattcccaagaacgtcttggctcagatgaaggagcgcttcatggagatggccacgaagcctgtgaagaaggtgggcgaggctcgtggccgcaagcagcgactgcagatgaagaagttgaaggctgcgaagaagaaggctaccgacattgccaacctgcccgacatgtcgacgcgcgagaaactcaaggcaatcgaccgtgccatgaagggtgccaagctccggaaggagagcaaggtttacgtcgtgtcgacgcgcggcggaaccaagaccgctggtggcaagaaggctggcaagggcaaggtgaagctggtcgacccgcgtatgaagagcgacaagcgtaacgccgacatccgtgcgaagcgtggcaagaagcgcaaaagataagcgactctgacctcagccagccgcgtccccttctccagttttgctgtgtacatgcacagacgcacattaacttaagacgtcaattaaagcacaacacgatgtatcatgaacctttgcactcttggcgctcgttgctctctccgctccaacgcttcatgggtctccacggcgctcgttgctctctccgctccaacgcttcatgggtctcgcttgcaatgacgattcacgagggacagtgtatccatattccggccacctgagatccgccggatcatgagcggtcgcattcacaacagcgcttgaactccatggagaaggcagagccgcggcccgtgttggaccgcgtggaacagcgtcgccggtacggcctggactgcggggatgccatccgctttgaggccgggtcgtgggcgccaggcggcgagcacgtgcaccaactcacggtgcgcaatgtgtcacaacgcaccatcaagttcaagtacgagctgccgcgcaccaagtacttcagcatgaacttccccaccatcatgaccctgagcccgggcatgctcacggcgctggaggtggcgttccgcccagttaaactcgaggagtacgacgacttcgtgggcttccacgttcacgtgatcgagggcggagtcgcggctgtctccggacacttccgggtgcccgtcatcgcgcgtatcgccgcgctcaaggttgagatcccgcacggcatcgactttggcttctgtccgaccaaggagacgacgctgcagagctttacgctgcacaactgcgggcagatcgacgccttgttcgactggaaagtgccagccgcgggggagcatggcagcccgttcgcggttcgccctcagtctgggagggtcaaggcaggggccagtatcgagctcaccgcgagcttctgtcctactagcgcatccgtgtacgtcacgactacagcctgcacggtgaaggtacgaggaggaggctaggaatgaggaatgtttctactaaggttttctctaggaatgaggaatgtttctactaaggtttctctgtttgctggtactttcagccagatagcaaggagtcgttcgcaccagctcaggcgctcgtggatatgatgaagatcagcgggatcagcaagttcacgcatctgtcagcctcggagacggagctcaattttggtgaagtgctggtgggtgcacctaacacgagccgtgctccgacggagaaggagttcattttgaggaatcgctcgcttgtgcgcgctagttttactatcgagaacgtggagagtgatcacgaccctcgcttctttttctcgccgcttagcggggttgtagaggccgaatcaacagtggctataaaggtgcgctataccccgctgagcgctggcacattcacatgcgaccactttgacattttcacgcctggtgggaaccgagtccgtgtcacctgcaaagggcgagcgattgggcccaagctcagcatttggcgaaagaatctggagtcgaatttcgtgcctacgcggtcggtaaattttcaagatgtgcctgtgggtggaaatgtagtttcaagggcaattactctgcgaaatgagtcgcccatggagatcttttttcacttcgacgctcaagctgagggtgtcttccggtttgaccgagtgactgggaagatcccgccgtttttggacctgaacgtcacgatttcattttcgccgcctcattccggtaacttttaccgacgattttttctgctagtgcacaaccaaagtactcgatatgtggacgttctggggaccggatatgatgagaaaacacgcccgtcgccattccagcaagcccacattgacgcgtatcgcctccgtgttgcagctggtcttggtcgcctctcacctgatcaactggaaacgtaccacgaagagaacggcgacgcgctatttcttaagggtgcactgcagctggcaaaggctgaagagttatcagctgccggtgatgatgcgtcgtccgtatcggagcttcctccacccagtagaatcctcacgagaagcggcgaagcttcgttagctgaagtcgacgtctgcagtgaatatttcatcagtatcgaggataaggccaacccggtggttgtggttggtgcgctgctcgacttcggcagttgtggtatcgttcaattcccgtctaagaagctgctgcttgtaacgaacaacacacacagtaaggtgacttgttcgtggcgagtggctgtggcgccagggccaacagagacgaacgatgatcaatcggtgtttcaggtcttcccatctagcagtgacatcgctgcgggggccactgcagagttccgtgtagcattccagccatcccgagtcaactcgtactattttgccgagctggaggcatttgcgtcattcaagtcgaaccgcacgtttcgactcgtaaatgtggacacgtttactcctccgtggtgcatggtggctaaaacctgcggtaacacgtttgcctctccgacagaacagtttctcccaaagatcagcttccggttgatgaagaacaaggtgaacttcccaccatgctaccttggagacagtgtcttccaaacaattatgattgagaacgctagtgacacgccggcactattcgcctttgtggaagacccagctgaagtgttttcgtgtaaaccaagttgcggctacatcgaggcgaaatcctttcacctggttgcaattcggttcactccgcgcaacgtgcggaagtactcgcattttctgcaatgtatagtcaacaatgcgcgggcgaaaccagaggttatcgagctctcggccatttgcgctctaccacagctgagcttccaggacattgaagctggtcaactcttaccatcggaggccaaagtatatgtgaagccaaccgccgtcggcctcctgtctgtgaggcacgtcgagttgatcaatacttctcgagttcctcttgtgtaccgctgggagctgcctgcaaagtatcacaacgtctttcgagtcaagcctaagcttggccgcctcaacggcagagagactgcgtcgatcgagtgctctttcacgcctgacgacatccgcgagtatgctggtcgctttttggttgccgtgaagtcgatcagtatgccgttggaccagcagaaaagtaccagatcaaagattccagttttgcaggagctcactgttcgagtgcaaaccaagggtactacgggcgcaatcctattccaaccggaggtactcaagtttgagacgattctcgtcaactccaatgccaagcagtcgttcttcatcgagaatactgcagactgcgacctcatgtactcactggagcaaacactgatctcgaaaacccatagaagcgtaggccaccaaagtggggaaaacgaggaagacgacaatacagaggatgaaaatccgatgtcacccgctggtaagctggtcttctcacaagcccaaggatgcatcccagcgcagtcccggaagaagattacagcaacattctttcctacatcagcggggatatttaccttcgaggtttcgtgctctattggcaatggcccaacgtcgtccccgtacgacacttgggggttccagcacaagcaagctacgtgcgttattcaagctgaggcctccttcccaaccgtcgagatccaggatttacgtgtgcctggactatccacgcaactcgcgtggcaccaattccaatgcaacgagctcaacgagtacctagcggcacctttaactaaagaggaggagagaatgggccgcagtacagcggctatggactcaagcactccagagtccgatgatctcggagaagaattctctctcaaacgctttgtgatacccttttctccagctccgttgggtagccgaaccgaaagggtctttttgaagctgcgtaaccccggaagtctcgttgtgcagtatcacctgcgctaccccaaagaggggaacgtagagatcgagcactgggcggagaccggcgcgccatcggcggaagaggtgcgtctgaacgccatcatcgacagcaaagtgtttggtatttcacctcgccgagcgacgttactcccgcaccagagtatcctcctcacgttatcgtactcatacacatcggaggcttacgatggcgagcacgacctcccgctgtacttagaagtggacagaggcaagaaagtggtgttggatttacaggggaggacgctcactcacaaagaccccaagcttttccttccgacgcatatctttcacctctctcctgtgactatcggtgagttccggcgtgggttcctgccaccacctgctttggcccgacatacaagttcaggcgaagacaacgacaatttttacagtgatcaacacgagacatcgactaatcttcaaatgggccgtccaccagtccagcaaatcgaagtgtttaaccgcggtgatagtgccctgcgtttggatgttggaagcatgtcgtttaagcaagtgaacgctgccaactatggctaccgtgtgcttgcgtgtggtagcagctctgagattatccctgcgaagaactcgattttcctcgacattgagtttaatccgattaaggtgggcattatcgaggttcctctacttctgaaagcacaaggcctgatgggtaaaggatacaaggagatagtggagattacggttgtggccacggggtaccatccgaagcagtggactctgcaacagatgaaagacgagctgagggcatccacggctccgccgaaaaagcaggttgtgagcatccctgacctcccagcatgcttcgtatcggactgcattgactttggtcacattgcgatgcactcggaggctaaccagcttttggtgttgcaaaatctcgttcctggagatcctgcattggcgtcgtcccgtagttttgtgtttgagtgggatagtatgcaccccctcgtcgcgaatgaaacgattgccttctcgcctaagcgtggtgtgcttggtccaggagagaaagcgcttattcgcgtcagcgttcacaccggaggtgatgcgtttgtggtgaaccatgacgtggcttgtatgatcacctatagagatgatcgcaaggatggcagcagcaacaacgctgctaccaacagcccgactcgcttgaagggacatccatcgagtgggaactcatcgaattatcgagggaacaacgacagcaagatctctggtcctcgaacttccgttatcaaccgatcgatagcaacacaagaggcggtagctgataagcgcagcatccccgcaacgaagatgtcggcattgggcagcaatgagtctcctgatacacaatcaccttcaccaattgcccagcgcagccaaggtacttcacgcaaagcaccatcgcaatcgacacgaagggggtcaccagaacggagtggcccaatgtcaagtagtgacagccgtcaactggagatgctggctgccatggagccgacaccgctattcgtgcggatatacgcgcatgttctgccgcttgaagtgatggagaggatttatccacgtgaagcgctcaagaagctgccacttacgacaacaaagcagatcccgcgtgtccttccagtacccgcaccgtcagttcgagacgtgaaaacgccggcgttgcctagcacaagagacacaagcacaccagccaggacgggtagaagcatagcttcgtcctcgacgcagcctaacagcagaggacgcatcgagagcggcagatcttcagtcgccaagcccggtactgccacagcttccgtcatcggagacgaatctgcctctgcaaaatgccgtgacgtcctgtacgacgtgatggagactctggtgatggaggtgctgacatctagcgccattcaagaggccctcgaagaccaactcaagccgctgccgcgctctgatcgagcacttgataacgcaagaacttcggaaggagctaaggctattcagtctcccgaagcgctgtaccacaaagctcggcagaatgaagattgccaggcgatcatctcgggtgtcatggagaacacggtgttcaacgtcctccaagaactcttctacggcgacctggagcaggagctgctttgcgtgcctcgcaaggcggtgttccccaacggcccagtttctcctactgctgctcaacgacccgcaatcgacatccgcaacggcaatggtcagtcacttgtcaagacataggtgctcgttcgttcagatgataaaaactgtatggagaatacaaggaaatctatccgaagttgttctggtagataaagagtacaacgtggtggtgcgcggcgcgcccttcactatcaggtcagcagctccgctcagctcgcttccctcttgtttggttttgctgattcctcctcttccttcttttcagcgtggaactccttggcgaacgtctccgccacgatgagcgggaacacgagcgtcgcgtcggcgtaaagcttgaccggcttcgagtccaagcgcagcttgccccacgaaatggcttcatcgggacgcgcgcctgcgtcgctgccatcgaactcctggcccgtgttcacgaacacgccgaagtcggcgccgttgcgcatgaggttggcgttcaggatgtggtgcttcaccatgccgccgccaaggataatgacgccggtcttgccgggggcacggatggtgtggtcgttcatacgacgaatgtcgctggcaatgtccacgatgaggccctcgttgcggtacgagtggaagtagatcatgtcaccaatggagccgtcggtcagcgacgggcagaagaccgggatgttgttcttgtaggcccagtagtagaccgactcctcgttgttgatctccttgcccaggcggtggatgatcgtggacggggaccagatcgtgccctgcgtcttctgctcctcgagcatcttgtccaggatggggtccatccagtcctcgaacttgcagtagttgtcgttgggcacgagcaagttgccgatgcggttgatgccgcgacggcgcaggttctcgcccttgagcgcaaagtcgccgatgtacgtgggggccagacacttgatgaagtcctcctcgatgccgcccgccgacgacacgatgacgtccaccatcttgtgctgcgccaggaagcgcagcgactcgcgcaggccgctcgagatgaggttggacgtgtagcccaggaagatcttggtcttgaccgtggcgcggtaggccgggtccttgcgctcctcgtcgtgctcgtccggggacacggggtcgtcgctcaggcgccacttgcgcatgcgcttgatctcctcgatggcctcgcccaggttcgtgccctggtagcccatggtcacgtagctctgcatgagcttctcatagtccacgccctcgttgaagtcgtagccgcgcacgtgcgcgctcttgccctccaggtcctcggagcgcaccagcacggcgtcctgcgccacctggggcacgctcgagtcggtcgtcggggcgctgctgctcatggtctccagcaacttgaacaatgacacgcacgtactgggtgatggacgactggcgcagtgccgaacctctcgactaagttaacctttacgcgacatgttggcattttggccaatactttgctgacgtaagtaaacttactcgagtaacttcggtagttgtccgggtagatatcctttgacaatcactctcccgatctcccttgaagagctgagcatggcgcacgacggcagcaacctgttccagatccgccgcatcttcggcttcccggcggcgcccgcggatgccaagggcgccgtgccggcgctccatatcgcggccatggccgtgcacacgctggagaagaagcagctgctggcgctggccgtggccgaggagttcccgcggcccgtcgtctcctccaagggcgcgggcgacacggtaaccgcgggacccgccgacgccaagaccaacttcctgctggtccgcacggtcgaggaggaccagcgcacgcggttctggcggttccccgtgtgctccacgcccaagcagcagaaggcgggcaaggcggagcggctctcggcgctcgagttcagccccgagggcgactggctcgcggcgctctcgcagcgcaagaaccgcctgcacctggtgccggtgctcacgctggtggccaaacagcggcgcgccatgctggacgcgtcgtaccagcctacgtcgcaccagcgcgagctcatgagcgtcaaccaggcggccatgacgacgcagatggcgtcgtatcttcgcgccaccaacgagtacggaggcctcaacggagctcgctaccactcgcaggtggctggggatgacgagcagatgagcacgctcgagttcgcgccgggtattggaagcatcacgtgcgtcaggtggtggaggtcccttaacggcaagaattattgcctcgtaggaggcacggagagtttgatatccattgtcaatgtggaggagaacgcggaagagtgtagatgtgaactggtgaatggaggaaccatcgttagtattgatctgctgcaagagaacttcaggaaggagcgcaggacgtctatgctggtcaagaccaagacggacgagattgacgagaaggagaaggagatcggaggaacgggggtcaggtactaccgcgtagtgctggaaaagaagttccagctgagacccaaagtgtcgccacgcaaggggaaggcacaacaggatgaaagcgagtcgacgaatgcgacgtcggcgctgaagattgtgacgacgactggtggatcgtcgtcttccagcgaaacaaactttacgacgaccaacactggaggtggttcgtccagcccgttcagctttgccaaagcaccaaagtttgtcgtcaagacgttcccgcagcactttttggaagacatggacttccgtccgcagcggatcaagaagaactcgccgcaggtgtgtctctatcctatcaacggtgtactgagttcagagtcgtcattagcgttgtacgactgcaagaagcggaaggccaacctctattccaacttccactggagactgaagggtgagtatgaagttcctgaccttatgccgtcatctttcgctgaatctggggagcaagatggaagcgggaggagtggaagtagtgaccagcaggaaggatcggaaggctccggtactgaagaggacaaagaagaagtcgtcgacgttgacctgagttactgttcgacggacttaatgctactccaaggtcgcatgtcaaagtcaaacgaaactatttctacgtgggtttctctgccttccaaccaaggcatggacgaagacgtcgtgaaagcacatattgtgcactacctctcgttacacggcaatgagaggattgagcgcgtagtgcagagtacagcacgaagccgtggaaacgcgagtcgaagtcgtgcgagcggtaatgttggtggtcaatcgggtgaggctgagattatctacatcctgcagacaaagcaccatgtgtatgaatgccgcccgcaatggtctcgattggcccttttcaaggcattgtgtgcacgcaccatcgcacttcgtgacgccttgtctatcggctacgcacttggtatcgacatggcatcgctgtgtcaggttgtcgcgaataccttgtacaccaacgtgatcgacggtactacacctggagatccccaacttattcaatgggtgcgcgatctgttcgaagtctcgcgagtggtgccgtccagtgcagtggagcaactgacggctatgggtggtgtgcaaagtgccattgactatgctcagcatgtgctatccaagcctgtacgagattcattctacgatggatcggagagaagacgcgtcgcactcttgctggtggagctggtactccagcagcagctgcaaaaggatacatcgtctgatattgacgcggggtcggaattaccatcgcaggaaaagaccgatgaagaacgggaggcgtggcttgtggagttcttggagacaaacagtgattacatgaccactgacattgtggatctctgtctatcccagcagcatgtggacaaagccatccttgtagcaactcggcgggatgaggtgccgcaagtgcttgagaagatcgttcacgagggcctggcctccgctttgtctgagaaaatattgcgctcattgcttgaatcggggcacgcttctgcgctcacccccccgtccagtcgcttaattctacgatccttccccatagaagtccaagcggaagttctgctggcgtacactccagctattcttcagcatcgagactggatagagcgaaatttaacggcgatttcacccgagctgtgtcaccagcttgccaccaagattgatcctacgcaaccggagagaagtgaacctgtagtgactactgcaacggaggggtctttgtcagggaagcatgctgatgtttccacgtcagaatttgtacgagtgactccagaagagcaagtcgagctctttctcacgatactactccgactaaatagtcctggatacggattggtgagcgaagaacccagtagtgatgacgaatattctcaagcaaaactggagatgcttatgaaggacttggcagcccagtatcgaccgcctattatggtgtctcggtgcgtggactacgagaattggacagctgcagcctgtatttatgaggcccatggcgagctagtggaagcacttgagtgtcggttgcactcgcataacgcaaaaatttcgtcgacttcaactgctgtggagacaccgtccgaggatagcgtcactcgccgtcggcagcagtcaggtgactcgattggaagtgctgtgtccgaggaatccgacttccaggagcagatgcgcgaggagctattgggtttgttgaattcgctcgttgtgcagagccacagttcagacgtcattttggagcaagtccgtgccgccattcttgcgcgtattttagttaagtggtttgactatggcctgaagcacacagtactggaagtatttctcatcgaccccgacgtgttcacacacgtgtcgtctttgttggcgcaaatcttcttctcggacgttgtcgcatcgattttgggggctgaatcgggtgggccggcgatgtctacaacaagtgggcggaacgttagtcgtggattcgacgaccgtgacaaggaatgggtgcacaaatgccagcacctcccgttctcggggcagttcctctttagagtgtgcgtgtcctttttggagaaggactacgaaaatcccgaggcgttggactccctcagctccgagtcgccgacgctaaagctgctggagctcgtgaagaataacgttgttgagaacgatctgtcgcatggtgctgtctccatcggcccccattcagcgcaggccctcggaaagaccgatccgttggagactcacgtgaaggcttttacatgcggccacctgttccccaagcgtgtgtttgaagaggaggtcgtgccggaattcgagaagcgaatgaacgcactgcccatgccgctgtttgcgacgaagctggctttcacgagggagttcaagcgctgtgccagcgagtcgccttgtccagtgtgtagtttcaacaagatcagccagcttgtgttccaacagtgcaaatccagacaagccgcgaagcggacggaacctacgaacggcgttggtgtccctggcgaaccggcagtgcgagccagacctcgcgcacagcttatgcagaagtcaaaggtgccgtactacttcttgcaccgagaagcaagtgaacgtctggggttttcagctgaagtgcaaaatatgaagccgctgaagcatgaagcgtgggagtggagagaacagcgagcttcttagagcagtatattgtaaactgatgttatcgcattccaatacgatacagtacttcaatatatattgttctgcgtaaaacgagtgaggttttcgtgtaaacagtgtctacacatacgtccattcagtgaaaaattgacgcagactgtgcctccttggcgccaactgcgaattccgtgttgacacaagtttgtaaactttgttttcgactcgtattgtgtgcacccaccagtgattcaccaaaattgagcttcatctccgacgcgaaccccactatctttgtcttctccacgagcgcttgttggcgccaaagcccacgccgtgcaagatttccaccatgagctgcgatgcgtgcgggcgcccacgacacgaagcgactcggatcgcgagtggcgcgctgcgattggtcgggagttggaatggatactctcgctgatgattggttggagatgttgaagtggtttggatttgatttagagattgtctaacagtacagtctcagcaatctgctcgctcagagctgaatggaattcctggaacctgcaaacgctgcaaacttgcatgacaaccttgatgaaaacggagaggggggggggggggggggcgctaactaagcattggtgcagtccgacgctcatgcatgaccactgcattcgcattgaattcaaaggaaactccgagtgagtgcaacgtgagctcacgctcacgtgccaattcaatctcaccggtgcgacgcgtctcggcattgccaagtctgcagttgaagcgactggcacaaccgaacgaacgcctgagaaactgatgccggtgctcttgaaccaggatcggcgtgacctcgagccggacttcccgccactcatgtctcggacatgtggatcagggtcttcactgcgcagcagcacgtcagcaagcgccgctgtcgagatcctacatgcgtagtgcgctcagggccatcggtgcaaatcagctttcagccgactgaacgctcctcgaaggcgcgcccggcaccgatttcccaccacccaagccactggcaccgtcaggttcaatcggggcctggagccaaatcccgtaggaaagagactctgcgtggtgctgaagcaagatctcatcacgaaggcgccgaagttgaatgcaacttgcgcgggatccgctatcaactcgctgcgattggctaaaagtggcctctcaattctagcaaatcaggccgccacgcgggagtgggacgattgcgccagacgcgattcatttgacttcagtatacatcagcgatccacaccggcagcgcgagtgtcgacgcaaaacgttttccgtacatcaagtcgccgtgaaaggcgaaaacgcaatgtgtggctaacgagcgcgggcgtggcgcgttgttactgcccgacacgttgccgacacttgggggcactgttggtccgccccccggcttccaaatcgccagtggattctggccagagacctggcgccgtggtcgcttgaaggttccctgaagcccgtgcgtgttgctccaacgcgtcgtgcgctcgttttttgcgacaactgctggtgccggactctccctctgcccgcccgtctgacagctatacgttattacaggtcgtttgacacggtaaattcgaacaacaacaaagcgtaatcaaaggatattcaatgaaacaggtgctaacactgatgtgcgccactccactttttcgcttggcaaggtaatttatacggttcagccagcgacggcgaaaccaggcacaaagtatcggcagccgtaatcgccagcagcgcggcaggacaggcctcccagccgagctgacaaccgcgccaccgccctcggaagccagcccaggtcccgacgcgcagcggcagtggcaaagcagcatgagcggcgtcgccgggcggcgcgaccagcgcgcgagcagcgagacggagatcgaatgcgacgagctgcagcccatgacggaggaggaggaggagagcggcgcgggctggcggcggctgctgaagctcccgccgcggccgtcgctggcgcccgtggcccccacgttctcgctgcacgacctggcgcagaagaaggaggcggcagcggcggggggcgacgagcacgcgccctcgacgctcgcgggccacgtcatgtggaggctcgccatgcgcatgtcgtcccactacgagagccgcctgctgcagcacatttcgcgctccatcctcagccgcggcgctcacaaggtaggcaactctcttcactggatacattgtgcagattcgtaactgtaaggaggtcggttgggtcacgtgactgatgggcggaccatgccgttatgaattgcagcatggcgaccggaagccgagtttcctgctcgagtacgactcggacactgccgactcctcctcgtcagcaacagcagcaacagctactagtacacagactaagcccaggaagactgtacggagcgctatcccaggcctgcggaggatagaagacggtgccagacagccaaagaacacacaaccgatggacccggacgccgccgcgtgccccgagaccagacagccgtcgtcgtctgccgcagcacgacccctctccagcgctgctgcgaccggagccgcctcagcttcgtcagcgacgggctctgccatcctgccgccgatgccgccgctggtcttctcgcccagcaaaggcagggcgtacaaacgcgcgcgcgtcatgactctgaaggagtactcgaactggaaataccctggactgcgtcccggtctttcagtgcgcgtggtgcgctccgagaccgtgagctccatgcctgccgtgaccgagtacgtgctgcacgtcgtggacctgcatacccgtgtgttctggatcacgaagaagcgcttcagtgatttttacttccttcgacgcaaagttcggggaatgattcgacgtgcaccagcagctgatgacgacgagagggattatttacgcttcctgatggacataccgttccctcgtcggcggttccgaccagcgagcgcttcggccattacacgcggcatgggcgagatcgaagtatttttgagaaacttggcagctctagacccgcactcgcgtctccagcgcagcattttgatggagctgcagctcgagatgtgctctgcggaatttgtgtcgtcgctggagaagatcgacacgacgggcgaaccgatcgagcccaagtggctgacctacgatttgttccgagtcctcaactgtgaaggcaccgtggaaggtagcacgtgctaccgcttcttgcacgcgttccgcaaccgcgtgaccacgatcgaaactgcagtgtgccccgagtgcagcaagtttgaaggaatcgaggtcgcagcggcggcagtgaaggacctgcgtaccacggtgacgagtatcgaaaagtacatttcagagcacctggatccgcagtacgccgacacgctctcgttgctggaacaaagcgttgacgtgcagtccgtgctggacgattgcgtgtaccacgcagtggaggacaccatttttgtaccactagagaagcaggtgaacttcctcgtgggcacgacggtggatacggaggccgagcagcgccttgtgaaaaacatcgagcgcttgcggtgtaggtcacagacagacagcggtattccggagcacctgcagtctgatgaagattggggactatcgtgccaccacctgagtatgattgacgagcgaacgctgcccatggacaagatccaggagttgttgcgctcggccctggagattttcaagagctgcggagagaagaacctcgagtggcgagaaaactcggccctgaccgcagacgactacctccccatccacatttacgtcgtggtgaagagcggattgaagcgcccgctcgccaccaaggagctgctgggtgccatgatccacccgtccctgatgttgggcgaggtgggctacttcctcaccatgttcgaggtcgcgctcaagtacattgccgacatgtaaatcaagactagctgagccaagctacacacacccaaccaattttgcgcgaccgcgacaagcagcgacgtcgaagcatttttcccattccaagtccagtataataggggattcgacacgatgaccgcaagagtcagcaggcaggatacagacagccctgcacgtttaacgtaagaaatgagacgtaccatactccatggcagtagcttcgtgtcactgacaagtcgtcagtcctttgccacgcacttgtggtacactgtacccctttccacaatatcgtccaatcacacctcattccgcaagatacccatgttcaagcggctcgtgctgcgtccgctgggcgccgtgcgctccatctcggcgcgcaagctgagcgtcccaggcgcacagtcgctcgtcggggccgtggctcgcctgccgtgtcttcaatgcggccaccagacggcgctgtcgctctcgcgctccgccgacatgggcgacgtgctggccgggcgctcggactgcggcaagacgcggctgccgctcgcctgctccaaggtgggggcgcctcaccctgtatacaagacttgagataatcctctgacgatatgtgtatgcgtttaggaatgcgcggagacgctggaggagacgaaacccgaggtcttggcgctgtacgacagcatggtggaagacgtcgagtattccgccacgcccgaagcctcgcaattgttcacgcaaggtagtgcaacattgtcgaaggcgtaggattgctcggactagttttttggtgaccgaggtgtggtttgtttcatgcagtgctgcagtcgagtcgacgggagagcagcgagtggggaggcgaccaccacctgacgtcgtggacggactacttgaagctgtacaagcctgacgaacgctggctgggagacgagagggcgttgaggctgctttcctcggcctactcgtacgtcatgactctcagcaggttcctgccggagttgatgcaggcggagaaggcaaagttcgagttgcatgtgatcggagcgcgcgccgaggctacgatgcctcggtatctgtgggacgagctgtcgttcttccatcctggacagcagtttgctattaagatcgttggagaccacgtgccggtgatgtcggcgcggaagaaaacaccgacgaccagggcgaacgagaacgaattcgtcgagctgcagttgatcaacgggttgtatcacaagatcgagacgaggaagctgggcaccccggacgcgttcgtgctgtacaatcccgggattggacacccgcatctgcgtgagagttgggaccctactattcaggctgtgctggcctcgtgcaaaccggtgctgatcacgtccttcagtctcgaggaccagcaacgcgatattgcagcgcttcaggatttggtcgccaacagcccaatttttagcaagcacgagcttcgattccaatgccgtgcaaagcagaactcgttccgtagcctcaagtaccaagtggacccttccaacgtgggcacccctatccagacgaatagccgcgtcatggtggtgcagttggcaccaactattggagacaaatcatcaacatcgtgacaaatggtgtgatctcgggtaacgtgtccttcgacagaaagcagcggctgatgatggctcgtatcgtgggtagctatcttcttcattgcttatacactgggtttgctaatactatatgctcgctctctcactcatcatgttggcctacgctggttcctattgcgtttgctgcagccactggcgtatagcttcaccgggcgtcgtgtacgtagaccctggacttcgctcggcctgtacgtacgaaatggcgatgtaaaactcgtctagtcgcattcgccactgctggtcatcctcgtttgctccacccggaccgtgatcttgcttcttggctaggtcctgcattactcgacgaaagattgcgcgcgaatcgttcgctgccatgccagcaatctccgtcataaaccgctcgaacgtgacgactgtcattccgactcggctgttgtctactgagttagagtccccaccaacagtatccgctgacttcgcgtagtactcgaagagcggccagagaatggtatcgacgtccatgccgacgaagcataaccgtggagctggaggcacttcactctcagcgagtaaacccaagtcgccgaagaatgacaacagcacttcgcgagcggagagaaggaattcgggtttggtctggctgctggcaagtgaccgagcgtaaagctcaagagcgcaggatcccagcaaaagcgtgaaaccttgtggtgctagcaaacctcctccagcatcgctcgactcacggaaccgatcgaaatgtgtctgaatgaaatcgcgggacaagaatgctgggtgcagtttgagatcagtgaacatgcggaagactgtagccgcgttgaggcagtattggttgccgagcgcggcagtgcgctgtccatccgagtactgaacgacaagtttgagtagcggagagtggaaggccatgaagagatcacgcacttgcggggccaggtgccaattcgcgtatgcctccatcgagaacgctgaagttcctcctgctggtgcagcgctcggctcagtgctacgtgatgttggggtggatggattgaggtttgctggtgcggacgcagttgagtgcgtaggggatccggtcgctctgttgaccagctctggaggaagaagggggtcgcattggtattccaagaatgtggagctaccgctacgggtaacgcttccattctcgcttgcagggtacgtgtgcttgagagaggatttctccatgacagcgcgctctacgactgcggtctcgtgctcgagtacggcgagcaatttttcctgattttggagaatgtcgtcgctgaggtgaccagcccatgaagccctcgaagggcacaacatcaagccggtaccattttcaccagcaccgttcacacctcgaccattggttggcgcagttcctgcagcagcagcgccacgggagactccaagaagcgaaaggagacttgaccagaaccgctttagttgttcgtgtttggtgttgctggacgcgaagagatccgtcaagaactcgttcagccccgtaacgaagtcggcgaaaagcaagccgcgctccactgcgtacggtgggaggtggcgggccagcctttcagcgagtgcctcgcgttcaatcaccttctcctccagcagcgtcgagtactccaggatacgaacaagggaagacatggcgagtcgaggcgacggagtgtctccctcgacccctctcgtgactccgccgtcattgacaacggcgctgtcagccgctgcgtggagctggaacagttcacgaaggttgttcaccgcgacatccttgcacaatgcgagcacggagaacggcagcgacagcccttcccactcgacaaacgaagtcaattgggtcttgagcgcgtgggccttttcctccagagctacgtgacgctcctccatgtggcggtatcgctcttcttcgcgaagcagcttcttcgatagcacgtccactgtgattcgcttgtcaagagaaaagaactggaagcgctcgagatcactgcgcagaacgcgactgtagtcgtcgagcgacttggagtacttgtcacgctcagccgccttgagctccgccatctcaacttgcaaccggagctccttcgtgacagcagacacgtgcgtctgaatgcgccactgcacaagcaccgcccgcaaccatgcgcgctcggtctcgcgaatcacggtggtcacgaatccgtgctttacaagctgcagctcggacccactctctgttagctcccctgtaagacgttgagcttcttcacgggaggcttgcagcttttcttcaagcttcgtcttcgctcttgatagcgagaacacgcactcttttgcttcggccaagcttccctccagttgctgcacgcgctcaagattgccacgattgttgtcacgcgtcgtagcgaatcgccactttgacaaggctctgcgcgtagcggttttctcttggcctagcagaacgagctgcagtttgctcatcccaagctccagcgaccgcgtcaaagttgcgtgctcccgttgaattttcttccaagtgctgaaggtttttgccgcctggcggtgctcgcagtggtccatgaggcggtccaagtgcatcacgccaagcagaatccgatgagctttcgcttcctgctttgccgtggcaagactttcctggagcttgttcgtggcttcggcatggctgtctactaccacaaagcgcttcagtttgttgagagctgcggccttcagtttgagtgatatgctgttgtcgacacttgacaacaacgccagtgctcgagagcgagctgttgtgatgccccgagctgcaccagaccattggaacaaggccgagtgaagcatgtctcgggatttcgtacgcagcagaccgtggatgatcaagcctcgcatacgtagccgctcctcaagctctcgctcaccgatggcattctccttacgctcaagctcctccaccagcgattcattctccgcggacagcttcgccatcttctggaacttgctcgtctccgaggcgatcttctccagcagatctgcttgcagagtttggttctgttccatgagctgcttggtctgcagtttgagctgctcctcgcttttgctcgtaagcgcgagctgatcgcgtagagttttgaccagttcgttggaactcagcgcttgcatctcgtgcttttgcgtctcctccttgagagttcggttctcgcgctcaacggcgtcaagctgaagctgcttttcgctgagctgcgccatcttctcgttcaacaggtggatcttctcgttcaattggtgaagacgttcctggtccgctgcggaggcgtctcgagccttttccacctctgttcgcagcgtctgcttctcgtgctgtaaagcttgcttctcttgcagcagaatctgcttgtcctgctgcagttgttcgtactcggataatggtacggaggggaccgaaggaacaggcgaaggcggggtgacaacaggtaccgtggtcaatgtgagcggcgaagacgagaatgtgctggacgtcgacgacgcaatggatggtcgtgatcgtctcggtgtggccacgccgctttcacttacagggctcatgaccgccgacacaacttggctcgagtttcgtcgtctcatggggcttttgcgagattctttcctgtgcttcaccacggattcctcgcgtcgtgatggagctgcaacctccgcttgcagagtctgcagcaacgtatccagtcgagcgtctgaagctgcacgtttgtaccgatgcaaacgtgaagaagaggatttctcgcgcttgctgctgctggttggtgtcacgacgttctcttcggcgcgcttcaagtcctgccacatttccttgcgcttccactcgtccagcagtcgcgacgatgtcctcttcgtggtctcggacgagtcccatacctgcgaatacgacctgggtcgagctagtccagaacgactgtcctctcgatcggactgctgagctagctggatcttcgtcgtagtcgatgccggactcgcgtagaggctgttggctcgcttgtaaggtgaggccgaaggtgacagcggcgtcaacggggtctttggagcggaatctcgtcgatcaagtgacatggatgtcgggatcggatgaatcagtgctggcgagggctcagagtggatcgacgagctataatgccgtccaccttctttgaaggcggcaaaccccgagagtcgcggcgatggcacactcacggctgtgtcgcccgtgcagttcactaccatgagggatggtgccgagtccatttccagaaccaaactggaccttcgcgagaccacggcattgtcgttgtcatcttgactgtcattgcctaggtgttgcagtgaagatcgttcgtcctctgacggccccgctgactcgcccgtgtgcatgttagacagcgggatgtcgactgcatccggcaggtagtcatcgagccacgcgtcctcaaagtcgccgtcgctgccgtcggcgtgctcgttgtctcggtaccgacccgagaaccgatcgtcctcttcgctaccgggttcatcctcttcgtcgtcgtcgttgtccggcgcagtctcccatgccgggccgccatcgtcgtccacgtgctgctggtcgtcgtcgctcgagaccgcgtcgcggaagtccgccatcccttcgaatcgatgcaaaacacgcgaacacgcaaaagctaaacaaggcaggcagggccacagaccaagttgcaaatagcctggcagcagcatcggcgctggaagtgttcaatgctccatttcgggaacgcaaacggacaccatagccacctacaacttcaactaaaaatatgaagctctctctcaattgagggaatctgctttgacgaaagtactttcttggtggaataaggacccaggtcaggcctggttgtattttagagtcgagctggaagctcgagcttaactctgacgctagtggatccatcagcgctaaagctggactgagtccctggtgtccaattcccgccatctatgtaaaaagctgttgcccgaatccacggagcgggtccagtggatctcagccgcttagatgagctttttgctcttgaagaacttcttgaggtacatgacctgccagacgcccatgccgagcagcacgacgatggagaagaagctgaaccagagcacgcgcgagttggtcgactcgttcgtgttgcgcatcgtagcctcgcgctcgcgcatgtagagcatctcgcggtggatctcgtccaccgtgtcctccatcttgcgcagctccttctccacgggcatgaggtgctcgcgcttggccacctctgtgtagtccttggcctccacgccgtgcttgaagtcgagcatgacgcgcacgggcttgtcgttgccgttgacgaagcacacagcgtagttgccgccggcgtccgccgtgaacgagaacttgtggatgtcgtcggacgacgtgtcgatgttggcgtcctgcttgaggaacttgcgtagcggatccgtgatggccagcgacacgcccgacttgccgcgaacgccgccgatcacgttgtagtgcaccaccacgaggctgccctgggccacctcgtcgctcaggcacttctcggcgcggcgccggatgtcgaactgcacggcgcccagcgaggcggcgctcatggccagcagcagcagcgtcagcagcagcgacgacttcatgatccgacttggtgtccccccggtacgaattaggattgtgtagctgaaggcgaaaggacgacgccagtgacctacgatctagaatgagatgcaattaggtaggggaagagtggtgtgacgcacatcattcatcgaattttgaccgagatggacgacgtgcgaagagactcacgcggaggccccgaccgggtgagtctgtgcgtggaggaacacgtttttgaggcggggcttaggctgatagtgtgtgcgtgggtatggtggatgtggtggcggtgaaggaatggttccagaaggagaagaagcgccttgaagacgaaatccgcgaggtgcgtgcaagtgtcaacgggcgcaatagtaaatagtaaataggtcgagtactgacagttgtgtcgttgctgcaggagatgcaagaggccgtgtcgaacgtgcacatcctgaaccagaacatggagcacctcaacgatgtggtgcgtcatcagccgctcttgcaatgacctttgtgctgctacttgagtgctaactggagactgttgtcgtttatgtacgtgcagggccaagaggtcgtggccatttcgtctggctgggtgcagttcttgcgtcagatgactgcgtcaaacgagaaagcgcgttaggttagctacataggcgtgtttttgctgttagaaggtggatagtctttagccaagccacctatataggaatatgcgccactcgaacctatcttctattagtgtgattgcacagggggttgttgctgttgcgcttgctgcagcttcgccttctcacgcaacgcggcgaggacggtcttctcgaacgccaagtgctcttccagtgagatgggtcctccggggagcgtcggcacgctgcgcttggatttcaacgcggtgctcgccgtcttgtcttccgccgacgtaaacccgtctgtctcgacgatatgaccttggatcgagacctctcgccagcagtccttgtgtccttcaactcgaacggcatttgcggccgctgaagcctcagcaaacaccacctttgcagacgacgtcttcatcttgatagcctcaatctcgccgtaagaacgcagctctcgactcagcgtatcgtccgagtgcgagtactgctttttatcccacttgaacgtgacggcacgctgtgacttcggagcgccatttgcctcctggtatttcttggcctcagatcgtcgcttcgcctccttggcaagacgctcctgcagctcttgttgccttgccaacgccttctctcgaagcctggacagctccgccttctgctgcttggcgctgggcttcctattgcgctcaacgtgctgctccttcctcagcaactctgcatcaaacaacagaagaagaaaaaaacagttagccatacacacccaacaagaggaacaagccgtataatgaactgtaccataccgtctcgcatctgtctgcgcttgccatcgagctccgcctcccgctcgcgctgcttcttcttggccagcagctcgcgcgacagtttcttgtcataggcctccttctttttggggtccagcaggatgtcacgcgcatgagtcagctccagaaacttttgcactgcagtgagagatccagaacaaggtgttagacgctcttccgttggcctcgcgatcgcagcgactggcgcctcgtaccgtctccgccgcggtcggggtgatgcaggatggacttcttcttgtaggcgcgggcgacctggcgctcatccgccgcgggttccagccccaggatctcgtacaggtcctcgcggaactcgtcgtcgcctgccatcgccgcttattgcctgctgctattgctaatggagttgggaccgaagacatggtgtttgattcgacaaaaacgggctcaaactgtggtttgattggttaaaagagctctctacatgctctcgaatagaagacctgcagccatctcgacgttgccgttgcaagtctgcagcgcctggatcgcctatagtgaaagaaagataacacacgtcgcagatgtcagcagcagcaacaacaagcatgagctccgccgtcgaaacgtacccgctgctcagggaaacccaacgccaccagctgagcgatcttcgcttcgttgctctcgccgccagcaggagtagcagcggcagcaggagcaggagcaggagcaggaggagcaggagcagggacccgtggggcgccagtgggagttgatcctggggttgaagccggaacggggacgccgccaattgtggccgggggctgcgctgaagccgctcggttctcggacgacgggatctcctgcaagacattgtgagtacattgcacgcgccaataggaggctaagcagcagtaatacgtacatgctccggcaagaaaggaacttcgtggaactggtcgccttcatggaggcgaagaacgttcttgcccaggtcaatgcagcactacaccacgtcatgaattggttagtactacctgcaaacccaaactgtgcaaggttgggctggaattgcatacctgatgccgcttcaacatgtccaggccgaacaaaaagtccacgccctgctggtccagaatagtgaagctgcagttgtagaactcgttgccaatcttcagtggggccatgtgcactctgccgataattgttgccgtgcccacaccgactgcctgttggatgcaagcgataaacgtgagtatcgccattttttcataacaatgcacaaaagcgattggtcttacttggccagcaaaacgcttatctaccagacgcatgataccgcagcgctccgcgcagctctgaagacatcaacgataacggtatgtgagcctccgtttcacataccgatgctagcacaacggagtcccttaccgacgacatgatggtcgactgcgctccagagtccacaaaagccttcacttgcgttccgttcacttcacagggaatgtaaagcatcgtaacacgcgcgaacgcttccggcatctcctcgatagcgatctccatgtttttctggacattcgacaggcggatacgctctgcgattttcgcctgcgcgtcagcgtcgaacgggtttcgctccagggcttcaatctcttgctgctcctcgaacttgcgggaggcagcctccatgtgcatctgcatcaatgccatgcgcacatcctgcagaatccaacatccaaagcgaaataggtctgaattaactaaaattgtcacaatcgataaaatggccgtgacatcacgtaccgacacactcttggtctgaagtgctgctgccaacttggggttgccttcttgcagctgcaacaatttgttttagtttccgcgcaatcagcacaacacacgcaaaacacgcaaaacactccactcacctctgcaagaagctgggggttcttgtccataatgtcaaggagaatttcaggcgaggcattgccctatccgtggcgaagcacacggccacagtcacgatacaattcttgttgaaatacttcaagcacactcactacccaccggaatttcgtgcagcttcatgcccggacgagccgtgaaccccgccgcactgggcaatccaggcctcgcagcagccggtgcagccgacggattgcgcatgaccaccagcagatcgtcctccttcacacccgcctgctcaaactgtcgattgtcacgcaccgcaaaagctttcgtcagtaacttgaggaggcaaacacgtccgccccattgcattcaataccgtctggtccaggcgcagtgggttgccgtccagcatcagcacttgggacgccgcggggattccgaactatgataaacgacaatgatacgtcagcagagtaggcttaataagctctgagccagcaaaggggagaagcctttacctgctgctgcaactgcggggccacggagccgagctgctgcgtgggctccgcgctgatctgcgccacctgactgccgtccgccgaagtcaccgtcacctgcatggtacctccacttcctctcagtcttattgcaagtgcaagtgatggatcgactggattttttacttgaatgaggtgggtgttttgatttaacccgctttatcacgtgggtgataaacgtaaaccctaaatagcacagcgggttaaaatagatgcctgataattaaaagacccatacttccacccagaaggcgaaagataccttagcttcgagaagcatacggtcagctcgagtttcagccaagagttgtcgatgatgactgctaaatagtggagctaattgcgccttccattagacggaggcgcctctatccagactgatatccgcgaaagccgccccacgcgcccgccatcgactgaatgaggtgccgtcctggaacagtggcgttccaatcgtggagcgggccagcaagaggccagcaacgcggtgcgactggtcgctgcgtattttcattcctcgacttcgcgggctttcggcaagtgtcgaggaagcatcgcgcaatgacgatgaccaccaccaccacatttcggtgtacaacgctcgagacgcccatgcagatgcagtcctgccacttgttctggtgagtgagtgagtgagtgagtgtgcagcagcactcaacagattatcgtcattactaacagcgtaacaacaggcacaagtccacgctcagcatcgtgctcaagcgcgagttggctgactgcgagcccagtcgggaggtgccggtgctccacgtcaagcggtccgcattgttcgggggcgacctggagatcgaccttggaggcagcgtccatcccgttcgaatgctgccggtgtcgggcaaggacgtgcacaatctacgcttcggtctcgtgtacgggcccaaacgcaagcgcgttcgcttccgcgcacctgacgtcgcgacgtacgacaactgggagatggttctcgaggtggccgtcgagaaggcagcagccgagcgaccgacgttccccacgtggccgtaccccgggacgtcgccgagtttgtcagcactggaagacggctatgtatcggaggagtttggattcagcgacaacgatggcagtgaggagagcaagcagggcgactaccgatttagacccccacacgcatcacagaacccgatgactggcagcttcgtggacttcatggacccgccgtcaccacacgagaactcgacaggagaggacgacgactattatatccggaccccgtcgaccgagagcgagtacgaaatggcgatcatgccactcgcccgcgaagcggaggtgacgcggcccgcaatggcaatacccagcagtcaaagcagcaaggccatcgtccatgaagagcacgcaagtggttcgaaccaagacgtggtctggtgctctcagaagccgcacagcaccgagcaccccttcgccacgcggctccgcctgcagttcattgcgagccctgagccgcaagatgccaagttcgctctcggcgactacttctcgtggtttcgaggggctcttgaccacagggacgagcgagaagtgctcaagtgcgccaaatagtgaaaaaaaaagagtatcatttgtagttgaagtgcatggcgtgcgtagatgattcgagtagcgctaagaaatagtgaaaccaagtgaagatcttttccaccaatcaccagctgtcaacctgtaactgccagcgagcagctcagtcgcatttcttccttcaaagtcgcagatcgatgcgtcatttttggagcgcatggacttctaccctgtggacgaggacaccccgctgctgcggcccgacgcgtcgccacgcagcgactcggagctctcgtcgtacccggaggccgtaaacagcggggactcccgcacctctcgccgcagccagacgcagacgacggagctgcagctgagcgtggacaaaatctccttccttttcagccccacggcgcgccccgggtacggcagtccaggcaactacaagagcttcgccgatgtgccgctcaacggaccgctggaggacgacgacgagctcaacatgctggacccgtacttcgacgtgaccccgtcgcgactccgtgtggcctttgaaggtgcggggcccgaaggagacggggagctgtcgtacgaagggttccgagcagcgttggggacgctcggcatccgatgctcggacgacgcggtgttcttgaagctggtgcagagcattgacagactgaaaagtgggcgcatcacgctgcagcagttcgacgcggcagtgcaccgcctcaagctgatgcacatgtttgatgaaggggcggtgcaggagatgaagacgatcggctaccagcaagcgtccatgtcggtctcggacttctcgagcaccaagctgcagagcttcgtgctgcgacaggaaaacttgcacgagttcttcacggcgcatcgacccgactgggtgaatgtgcggtggatcaatctggacggacgcgacagtctgaacctcaagaggctggccatcaagtatcgtttgcatccgcttgcgattgaggacacgattgaaggtcacgagcgcccaaagttcgaccgctacgatggacatttatttctcgtgttccctgtgctgaggctgcaattgaggccggataaagggctcccattgcagcgcaagcgtaatcgactgtactcgtgcacgcaccaaggagactcgcacggcacacccttgcccactctttccaaggagaggcgaggctcgttccaccgcaacataagtgctgccactgacgacaccgaggacgaggatgaagatccactcaaagtctggatcgagcacgtatttatcttcgtcgtggacaatgacacggtcatcacggtcaaagacggcggcgacagtgatatctggaccgagctgaatcgccgattggccgtgccatactccaagctgcggcataacgacgctaacttcctcgtgtactcggtgctcgacgtgatcgtggatcaagtgacaggcgttgtcgattccatcacggaatgccttattgagctcgagaaccagcttgatcaagagcggcaccgttttgacctgcgctcgttgcgccttctgaagaacgagctgttccgacttcctcggttgcttaagcccgcacgcgaggtgctcaagaacatcatcgagagcaaggatttcgacgccaccgtgacagactacgtccgtgacgtccacgatcacgtcgttcaggtgctcgacgacatcgagcaacagctccaaatgtgccgccagctcacggaagaataccgcgatgcaaaggcgaaccagatgaactacgtcatctacacgctcactgtggtcacgaccgtcttccttccaggccaattcctcactggcgtttacggcatgaacttcgatgacatgccggaactccatgagcgctatggctacgcactcttctgggtctctgcgatcgcgattgccgcggcactgcagctgtacttccgctacaagcaatggatctgaggtgtaagatcctgaaggatacactactgtgataaatgtggaggccaccttccaatgaacagcgtattcaaaaccccacgtactctcaagctacgcactttgcaaacaagatctttattatatgtagtagctgcctatctagtgcttcttgcccttcttgcccttgcccgacttcttcttgccctgctgctgcttttcacgctcctcctcagccgccagctcttcgccgagctggtacggcgaccggaaagacgccgagatatcgctggacgcagcggtagccgctccctgcatgcgagagccaaatcggcgctccacaccctcgttctcggaggtgtcccacagcgccagcacacccttggagccgccgacaccgagcatgaacggcgagtcctggtaaaaggccagcgagaacaattcgccctgcaacaataaaatacaacagtcaacttaccggacttcaaacaccacacgatgctccagcaactacgtaccacgttcatctccttggaggtgacgcacacaggcgagttatctttgaggtcccagagcttgacagtcttgtcaacgccagccgtcgccagcagaccaggcacctgagcagagaacgaaatggccgacacggcgccagcgtgggcgtcgaaacggaacagcggggccgagccgttcattcgcacgtcgaagcccacaacaacaccgtcctccgaagacgccacgatggtgctcgggttgtgcggcgcccacgcgatgctctccacctcagcactcaactggaacttagagaaggcgtcgggctgacggccatccagcaccacaatcgtccggtcaaacgacgcactcgcgagcaccgtcgtctcggcggggttccaacgcacgctctgcaccttgttgctgtggtgcgccatggtgtacaggcacttctgcgtggtaatatcccacaccttgacagtcgagtcggcggagccactagccagcatgttgcggtggctgctgttccagtcaagcgacatgacggcgtcctggtggctgccaggcttgagcgccgtcttgcggttcttccgccgcttggagatcttgggcatagccacatcgcgcaggtcctcgtcctgctcgccaccaagcgtagccgacggctcgagcacgtccagcacattgaggtcccagatctcaatgcccggcttgaacgttcctaccgcaacaaagctgccgtccacgggtccagtgctcgggtccagcggcaccggcgcgcagtccatccaggccatggtcagcgggaaggccggcaggttgatctcgtggtgcacgtacagcgcgccgttctcgtcgtcgtagacctgcacctcgaggttgctgaagtcctcctccgtgttggccacgaggatgacgctgtccgtggggcggatctccacgtcgtccttgtccatctccagctcgtcgtcctggtcgtcctcgtcgtcctccatggccacgttgccctcctcatcaggcatgccgtcctcctgctcatcgccctcctcctcttcctcctccatggcgccaccgccgccgccaacgtagtttttgatcgcggcgtcgtcgtcctcctcgtcgtactcgtccatcttgaaggaggccggcagtccgtcgctgccctcctgctgctgctcctggctctgctccgcagcggcagcgtcctcctcggccatggccgcctccatggcgagctgctgctcctcctcctccgcggtggcggcctcgcgcagcatcttcatctcgtcatccgtcagcttgaacttctcgggcatgcggcgcgacgcgcccttcgggacccacgcgagcgcagagatcatggcggccaggtcgatgtagtcggacgaatggactgtgaagcgcttcggccgcgagtgcaacgcactttggccatcgatttcatcacccgtcaaaacaaatagcatgtagccatgcgatgacacgcatgcacaaatcacaaaaaaaagttagtcagcacaatatttgtaccgactaaactttagtctggactacaatattgctgcatcatggcgtcgctcgacacgttgaccaggtaaggaaggaggctacgctcgctctgctcttgctctgcgctctcgtcgcctctgaccgctctacatgtccgcaggaagctggaggagacccacggggagatcgtccacgtgcggggcgaggtggtggaggcgctgcgctcgttctacgcgtcgtcgtcggccatctcggcggccgacgcggtcaagatcgcggccaaatggggcgcgtcgcacgcgttccccatggcgggggacgacgccgacgcctcggacctgcaggagaagatgcggcacctgaatgtggcgctgctggacgccgtggaccgcctccagctggacgagagcggcgagatggcgcccgaggcgcagctgctgctgtccttcacgcagcgcgagcggctcaagaagcaggtgcagcagtccaaggccatgctcacgctgatcgagcagctcacggagatggaccggctgctgggcgacgtggacgaagccatcgaccagcagcgcttcgtcgccgcgtccgagaacgtcgcggaggtcgagaggctcgtgcgcgagctaacggaggctgaacagggagaaggaggcaacgtggaggaccggaagatcatccgcgtggtgaagctgcagctgctgagcaagaagaaccgactgctgaaccagctcgcgaggtacttcgcctgcactgccgtgtggaaagacggcgcgctgaaggtgacggcaggcttcgtcgagaacgagtttgagacgacaaacgtgtcgatggaggaacgacgcagtgatttttggagagcgtgcgatgttttggagatactcacgcccaagttgaaagagatcgctaaggccgtctcccagcacctcatcaagcccatgctgcagatgccacttagctcagtgcaactgacgcgcgacgacagtggggtggcactgagaattgtggctcaggatgtgaatgtcgacgattcctcggctgagagcgaggtagagagcaagtgtgcaaatgtcgtgagcgtgcttcagttcgtgcacgcggagttgttcgcgggaaacgccgagttgatgaaccagctcggggatttcatgtggaagatccctggtaacctcgaggcacagctcatgaacctgctacaggataaaatcccacaggatgctgccgcgctggatgcataccgagatgtgctcgttaccacggtaagtcttgtcaaaaatgttgtgcaatactgttggctagcacagttaatgatagggactgagtatgtgctgtttctcacgtctaggttacgagcttggagaacacgttagtagcgattggtttctcggctagcagcaatagtcagctgcgaggattcgtcgaccaactcaaccagtacgttgcagctcattgctatagctcaacgacgtggtttattgagactgatgctcttattgctctcagattacactgtaagaagcggcgacaggccattttgagccgtggacgcgatctaatgcgtcaaggctaccatgattctgttaaaatcactggtgccacggagaaatgcagccttaatccaactggaggcactggcaaaaaaggaggcaaagggggttcaggagcgagctcctctctcgtcagctctaacgctgatgatgtcgaaagtagctgcttccagatacctgactatcgtgtgactgtatgtgcgcacgaagtggtggaactggcgcaccagaccctggttgagacatgcacggctgacgcaatgagcgcgaagttgcttttccagacgtctcgagatctattcttcctgttccggacgattgtgcccacgttatacgaagacgatattgcgaatgactcgcgggcctgcatgctttatcacaacgattgtctctacatcacgtatcacatgctcgttatcgggcatctctacaagcatcggtatgcatggtagctcttgacatacgtacttttctgtactaactccatacgtgctttgatgtaggttaccagcaccgctcagccaaactgccacgatgatcgacatggtaccttcgtttcgagatgacggcgagcacgcactgacttcgtatgtcactgcccaactagacgaggtagcatctgggatgaagaccctaccggtacgtttactgaagcggcataccagttgaatctttgacgagttacttaacttgcggtgacatatttccggtgtagtcgcttggagccctcgattcggaatatgatatggagcttgtcgagagcttcttgaagagtacactctataaactgaatgggatgagctcctcgtggcaagaagggttgccgacagccgtgtacaacaaagtgatgtcgcggatgcttgagcctcttgtaaagaacgttgtgaatggcatcttgagtcaaacggtaagtcatatgttgcgctcgtgtgctaccaattctctgtctaacgttaaactaatgtgttcaaactgcagaaaatttccgaaaacactggagctcacctgcatcacttgctgtcattgcttctggaggtaagcatttttcgtaaagaaaaagatcttgctaggcaaagtctttgtattctaactgctatccttttaatttgagcagtctgaaacactatttgcatcccccgcccaagccgcgaagcatgttccaagtatcggaaggctctcgaaactcactgcaattctggtacaaatgcatcgctgtttcctctccaaccccttgaacatgcgtatctaacgatttctgtatgtgtttgtatacgcctacagatggatccactcgcaacagttcgtgaaaagtttgacagcggaatcctaggcgcgttttcatcgaaggaactcgctgctctcgtcaggtatgctgccatgcagaagtataattgcatttctttctcgtgttgctaatgaaattatctgtgtcgtgtgaagatcgctcttccgcgagtctccggagaagaaggcatttctacaggagctgctcgtggcttgagtagccccaataggtggatcatccataaaaaatgaaattaccaagaccaaaagtcggacgccttcctgtcgtaagaaacacacaaaagttggttctgtgcgtgtgtcggcccccaaattaaagggccaaaagttagaaacttttctgctggcatcgctttcgagagatacaccatcttgttgttatggacagaaaatccttgcttagttcgataaggagagtatcttgcacactgtcctccattgtccatcatgacaaatatggtacaatatcgtgtccgttcggacacaaggaaattaacagcaaaatcttacaataggatctgtccaatagagttccgcgatgtcagtattttacccaatcagcacaccgtaaattgtacatgtttgagaaaggccaactttcagacagttcggacatattttgtccgaacatcatataaatatttgatattttcatagtaaaggtcagtaagtgaaatattgtaaaaatatcgtcaatattcgtacatatattaattccgagagggccagacagacgagacagcagagccactcaagaaacgactcatgtcgacgaaggcgctcatacctgggaactcccagcgggctcgctcgacggctttcaacgccttcgagcgcttcgcggtcgcggagggcttcagcgccaacgccatctatgagtttgtaggtggggactcaacgggggatattctgtacatcgttctcgacaaatttgcagtgtatctagcatttaaggaaagctcaaagggctcgctgctgtccaagaactcggtggctagctactttggcaacgtcaaaaaccacctactggagctgtttcctgctctaagtgctgtggtaggtcgtcggctacaaaagattgcatcgatcctggataagtactgctctaagcgaggcacagacttcacgcaccaggccccaccatgcaccaaaagcgatctgcgctcgctcagtttggcgattttgaagggggcagcttctccgcaggactaccaggatgcagccctcctcaacatcctgtggtatttgttgggtcgatcttcagacactatgtgtctcatgaaaaccaggtcgccgtttatcctggtaagtgcatgtgctaataatttgcctaattgtttttaaccttgtttttgtattgtgtttgtggtggtacacaggtgggtgtctgtttatcacctttaaacgaatgaagtccgcatcgtaccaaggagcgtcgatatttcacgacccaaacgattttacctcctgcccaattcatgctctagcgttggctacatttatgcagtcgactccaagcgaatttctcatggatcagcttccccgagatacacaagaaatcctgcctactgaaattggtgaaacacatcttcgcgaactgctcgatgcgcgtaccggccccctgccaagccccagcaaggaaccgccgatcaagaaagcgcctgcaaaaacggcaagcgtccctggaatccacgcgtatgtcaatcgcgtgctgcagaagtgggctgccgtttgtcaaagtgaaggtacgaacctgaccccagggctgtcgtcgcattcgtttcgccgtggagctgcccaaaacgcgaatagtgacagcaaaatcagcactccttggatccttgaccgtggagggtggagcatgagtgctgtgagcaaagcgttcaactacatagtaggcacgacgcaggaagaccaaacagtgggaaaatcgttagctggatgggatcttaaagctacgtcgcggcagaggtccgaaaatacagtactatattgaatttagtgcgagatcagaccgtaataaaaattacaattcagcaaggagaaataataaaaattgccgcaatataaatatactgctcttcaatttgaggcatttctacagaagaaataaaccactttctgtgcgtcataggattacagagtcgtttagaaacactttttggggtgttgctttagaaaattttgcatggtggatgcttaaacaacctaccggtagtaatgcgtgagggagatatatctggatcttgctatatatcgtaaatctggtgtagtggattccagggtttcaccttggtatcaccgcagttaagggctcgatagcatgtcgcggcggtgacccacgcgagccacaggtaatgggttcaccgcatcatgaccagtcaagcttcacacagaaacacttcatagtgtgtgcacctggtatgaggctacagactaagcattttgtatgatcaactgcttcgcggacccacttcgctttttctcctacaattgcctcaaaggcgtaatcactacatcaaaacattaagctcaagtccctagtggattgccatccgctgccgttccctgatgtgatgtgttcggcgggattcactacatctggacgtcattgatgttctgccttgcgtacatattggtttctaaagatgttgattgcccattatggcttttactacaccttaatcgttgcgtatatagacctaactatcattttatgacgtactttgctatgtttggcgccgtgcaaccttttttcatattaattgtcaataattggtacaatactgtattgtattggaatcgttgatctccaataataaaaattagtattgcaaaacccaattatttattggatcgcaattattatttcggacctctgcgtcgcggctacctactcttgaggacttcgatcctctggttctgcaccggattcgcctgctccaagccaagcttttctcggctgcgacgggtttcacggacagactcagcttgcgagacgacgtagtcgacgtcctcactgccaccgccattcttcactacccagacagaggagggcgatgccaagggacgtatcctgagttcgggtcgggaggctgaggcaaacgtacttgctttcctggatgctgagcatgtcaaagcaaaatcgcacggcacaatcgtcaaggttctgaagcgtatggacgcagaaggtaagctcaacgaccgcatcaggaattaccagcgtctcaggcaagaaggtaaggatctagaggacgccccggtgcacgtgctcgagacctacaacgataacaacaagtcgtagacgaaggcattggtagcaactgtgttagaagcgtcttaccattcatacgttcattagccgaatagatatctacttacatgagcttcaatacacgcccgctccgccacctcgtcctccgaggaccagccgcagtacgacccgccgccccgcacggcgccaacgtcccgcacgtcttgctgttgttgctgctcctgctgacggccgccaccaccacctcctcctcctccaccacctcctcctcctccaccaccttggcctctgctcgctgctgctgctggcctcgagggccgccaccccgcccgaggaccagccgcagtacgacccgccgccccgcacggcgccaacgtcccgcacgtcttgctgttgttgctgctcctgctgacggccgctgctctcaggccggtgtccgccaaacagccgcagtccgcctgtccgcccgtgccagaggaatgaaaaagatttatgtaaaccacactccatggaccacattcaataggatcgaatttcataggttgtccgaatgtccgagctgtccgatcctgtccgaacctgtacggtatggtgattgaaaaatgtaatatgtaacatagaaattgttggtttcttccttaattttaggacaaaaatcacatacttaacaaagggttcgtgactgaactgaaggtctcaccgtctatgaaacctgttttattctctgcttcctccaagtttagtaccaccgtttgtgttgttgtgtccatgtatctctacgttgtacgattgccacgtacttcgaagtaatcgaggcaggggttccaacaaacaccttttagggtgaaaacgaaacgagatggggcgccagcaaaaccaaacgggctccagcaaacagaaaccgcggttttggggcgccagcaaacagatttgcgggcgccggcaaaatggatttgattttgatacaaagccaggggtcgatccctgaccttttaaccatacagaaaaggcggcccgttcacaagtccataatacactgtaactatctccgagccccagtgaattacggcgattccataatacatataacacccacgtgttaatatgaatcaaagcatactgtgttttacgtgtacatgtaacgaaaagactccacttgttggcaccacgctcttatggcagcttcagaatccagtagttcaggtcggcataaataactatatctattataaacattattgttataacaatacgaccacgataactcgcgccgacataaagtgagttcacccagatccgtataaagtcggcgcgagttaatgtgaagccacccagattcgcataaactcgcgccggcttaaagtgagtccacccagattcacattaactcgcgccgacttaatgtgaatctgggtggcttcacattaactcgcgcgagttaatgtgaatctgggtggactcactttatgtcggcgcgagttattaataatgtgaatcttggcaacagcatgtagcagctaggcaaccaaggtgcgagacccagggcgtactggggctggaatgtccgtaggtgacttctgccagaaatagccgtggggtagaaggcgaactgcaatcaacgtcaaggtccttacagcgttattttctggttgcgactagaaacgtacctgtacgcacaagtaagtagaactacaactcaacgtataaagtgttttaattagtatgttcaagactaccgcgtgacggccgcggagttggcttacagctcacccggcaacagtagctatagcgtgacctcatagttcaaaatcgcgacgaacgcgccgcgtccctcgtagaatcacaacagcttacaagattacttaggatttctgtacaactcactaacaattgagtcaacctgtagaatgatttacagttatgaaaccgctggcacgctcaaactacccgcacaaagctattattactcgtagtgtggacgtattggctttggttatgatggagctggagggcatatcctttgtctacggactaaatcatgtatttactcacctttcggctctatacgataatattttcttaaatgtaactaaaagtaaacaacacgcgctggtgcatccgctttgacgagcaagactgtagatgccatgggttacccaaagtatctatgcgtagatgttatcattgctacgcgtcaaccgttataagacgttgcgatagcaattgaaatggcttccatccatatattcatcaccatttctaacatccaacatcgctgcttcacctgatctactagactagccgacattgtctcgaatacattttatcgatgtttcaagactaatgtctagattaagcacatttctaagattttagctgatactttgatatagtacatcatagctcgttagtgcgtcacatcaaatagttattccactacgtaccaaatgccttatcgcatgctggttcagccacgtgaccatgtttgcctagattaaatcgtatgtgcagtatgtcccaacgcggtgaagtagtcacgtaggcgtttgtacgtacttctagggtggaccgctcacggataggcctaccgggacgagtttccgtgttcaacaagtacgtgtgggcatgtaaaacgtgctaaagttgcctagttcgagttgacgaaaggacgagccagaaaaacggcagcttcactttgaagatggtcatgtgcaagcatttcttgagcttaagccgcggctgatagctccaccaatgctggtccaccgacttctcattccctttccatgagagtatggactgtacgatcgatggttatttctagtctgtgttgatatagaacagccgattaatacataaaccttctacaatcgcataacataccgtgccacaaggagctcttcctcatgagttaaaccctagataatttccgatgaagacaggttacatccaccgtgcgcagtgatgcgctcacctagtgtactgcgttttgctgttagtgaaagttactagacactaactcactgttacctgtacgtttgctgactgtaagtagacgagtaagtaagaagagaataccattatttattatttatattaatgatgtcatttatacctacggaagagatctaaacactctgctccctggaggtccgtcttgtagcgaaatatattcgggccaggccgaacgcagctctgtgtcttcaaacgcaccgatcgtctcgattggagtgtgacgggccaggttccaggtcggtctttcccaccctacccattttattagacacagccgctgcatatcaacaatcttacgggcatatatgctttcaacaacaaatacagctccgtcatcgctgctaatagaggttctcgcctcgctatcagttttgtctgctacaggagaatcctgactgtatatgtcagcaggacgactcgtcgtagcaactcgtatggggatgtgaccatatcgggtttgttgtcagacaaatcttggtcaggttcatcgaaccccagcgataggctgtcaggctcctcgatttcgggaagttggtggacggagcccgtgaattcagatagttggagatcggaatctccaatgtgcgggaggtggctggtagagctttcaatttcaggcgacgatgtccgtccagtagtcttccgttttcagagtctctgcgtcgcgcccgcactgtcgttgacaatgactgagctgcgccagggtggaagttttgtgaagtgacttctgctataaggtcaggggcggaggcaggtcgtttgggggggggggatcgagaggggggcagccccccacaaaaagtactgcttctctgtgagcatatttaacaagtttctctattaggtttttaagctgacaccaggtcttaacgctagcatcgctccagaatgcttaactttagcagattgcttcgtttattaacgttgctgctcaaattttcgattttcatcttatatccatggattgaccaagctcggtttaatttcaagaagtcgatcacttgagtactaattgttgatagctcatccacaatgctgccaatattgccctgcacgcgtcttcctggtgataagtttgaggtgttacttaattctgagtacacgtcactgtcttccgagtaattccacataaatctgatttgtgtggagtagcggcctcacagaaatcgcggagttcgtcctcgcacaaacccgacgcgtccaatctgcggtcgtgacggacaatttcccggatcttgagtagcgtatcttcgaatatagagcccaagtcttcgcaagcttcagagttagggggttgagtgggcgcttgttccttgtcttagggcgtcggttgttccttgggcgtgcggacttatcgggccggcgtttcctcggagaccccgttgggcgtgcggcgttatcgggccggcgtttcctggggcttgttgcgtggcgttatcgggccgacgcggggtcttgtgcgcagcggttatcaggccgtgcagtccttcgtctaggctgcgcgttatcgagcgcctcctaaccggtatacgttttacgtgccttcgtttccagcacggggtttgagggggtgagtgcccgagccagcgagcgacgggggggcgcgtgttccttgcggctctgcttgccgacgcttggtggttttcaagaacctggcgatcttccggaggggagaggtctgagtggttcagagaaatttcgggactgagtacttaccctatcctatgccctcactactggctattccccactactgctcgctaagcctatcgctccgtgcctatccttacttctgtcgtgcttgcactaccgtccttcaacctgatttacgtagcataatcaagacttgggcttgacggggtttctcgacggggtttcctcgacgggatttcctcggcgggatttcctcggcgggatttcctcggcgggatttcctcgacgggttttggggtcgacggggttcgcatagccgggcgtgcgaaccggctcgtcgaatcagtcaggatccgcctgattccgcagctggtctacgtgtcgcacggtccatcaccccgtcaacctccctggcgatctcgacgcgtcgtattccgtccgcctcgtcggctgacatcactctcggtcactcgttccctggtgcgcgacatctcgtggggcgccattccacatccgtcccgctgccacgcacgcgcactccccaagtgggtgtgccgtcgcagaactcgctctgcgtctgtcgcgccccgtcctactgaagcttctcccgtcgccgtatatcgccgtcgttccttccaagtccacggttcgccgcgacgacgtacgcgctgctgatatagaggtggtcgatgacgtgctcgataccgaagacctcgaggcagccggctgcgtcgtctgcgcgagtggagcgcaccgtcctcatcctcccgcgcgtcttcccgcttccagcacctggcacgccagttccttcggtggcggctctcgtagccgacgtgcgcgccctcgcccaggagaatcgaacgcttcgggctcagtatgagcttgtgtcagtgaacaatgccggcttggccgcccacgcctccgtgctacacgatcgggacctcgctctcctttgccacgcccgcgaaggctatcgggcgggtgtggtgatgctcgagcaggcgctcttgtctcgcgagcgcactgagcgggccaactccgagctcgaagaccgcgtgcttggcctccgtgacatggcgggccatacggctgccgccgagacacaactccgggtgttcaaagtctcgtcggaagagaactatcacaacttgcagaaccaacccgccgcctcgcaagcgcaggtagctgacctgtctgcacggctcgccgcggtccccgcggtgccggcccctccctcgacgtctacggtctctatggcgcggctgttcgccgcgctcggtgagcgggacgacgcgcgtgctgagcgcgacgacctgcgcactcggctggctgctgcggaagctgccctcgtctccgtccaagctcagctcgacgcggccatggcggggcgaggtcgggctcgccagtccgccgtccgtcgagatcggcagcgtgacgtctccctcgccgagcgtgaccaagcgcgtcgggactttgcggcgctcgagcaggagcgcgacgcagtcgtcgtggagcgcgatcaggctcgacatgtgtccctcgctctggagcaaactcgtgacgctgcaacccgtgagcgcgaccaggcacgtcaagctcaggcgagagctgaacagcagcgcgatgctctagtcgaggatctccgcgtcactcgcaactcacttgctcagagtcaggccgagaccgtatctgcccagcggatgaacgacccgttgcaagccgacgtccggcgtgtgaatgcgttgctggttgcccacgccgaggagctccagcgcgagacggctcgcatacgcgaattggagacgacagccgcgactgcctcgacggcacgtgtggtcgcagaagcggagacagcccgggcccaggctaatgagctgcaagctgtctcgcgatccgggcagtatcgcaccggctggttagccatgtggcgtcggttgctgcagcggagcgatgcggccggcgcacatatccgccgtctgagtttccgcgtcgccgacctggctgacgaacgcgatctagcggtccaggagcgggacgagcgtgcgatggcctggagacgcatgctccgagacgcgcgttggagccgagagttggctcagcgcgtgcgcgacgacctggccggcaaactggccagctccgtttcgtcggtaggcggtaccatcgacaccgccggcctgatccgccgcctcgaggctacctacgtagcggaagtgaacgctgccgtcccccttcctcccgccgatcccgccggggcgctcaacgtcgcgtagatggatgccaacttgcgttgtcgcgtgacgcgtggccaccacgcttacctcgtgcctcgccttgcaggcaagtttgtccagcaggtttgagcgtagcccgttaccttagtgtagatcgtagccgtaacttcaatgcatccccttgacaccttccctcttttctttccctttttcacatctttctatgagacggccctccgccgtctcatcttcagcaacaggctggttctcctcacttccctcatccaatccctcgctccggccattcccagagtcgaggcttcccaccagtcctcccgtcggcagcccccctgccgacttagtcgcacccgtgggcgctcacccaccaggctccgccgcctccgcgttctcgtgcgactgcatcgcctcgaaccggttgcgtcccgtgcgctggcgcaggaagtcgtacaacaacccgccgcaattcagatcgagctcgtcgacccatgtcgtgtccgggtagcccttccatttgacttcgaactcgcgtcgcgtgcgcccataccgggtaacccgcccctcgcgcacgttcacgatcttctcgacctcgaagacgtcaccctccagctcgcgcgtggcttcccagctatcttccgccaagagctcctcgtcgaagtcgaagcgttctttggccggcaccgtcagctgcgtcgcgggtcgcgacgagaattcccggacaggcttcagcttggagatgtggacgactgggtacagctggttgggcgtacccgccgtctcgaggcgcactgtgaacgcgctgaccagctcggcgacgcggaagggtccgtaccacatgtgcgcaagcttgcgcgcataccccggcttcacccgatccaggtacagccaaacttgcgagcccgtcgcgatctcatgttgcgtcgcgttttcagtctgtcgacgctctctctcttcgacggcctttcggactaactccaacgcttgtgcccttgccaccttgtagtgtcgctgaatacggagcctccaccgcctcacttcggcgtcccgggtcgacgtgttcccgacggccagcgttgcttccagcgtcgaccgaggatcccagccgtgcactaagaagaacggggtttcgttcctcgtccggtcgtacgacgtgtttagcgcgaaggtaagacgctcagcgtattcgttccagtcgcgttggtcgacatccgcaatgtacatcttgatcgctcttgtaaccgtctgcaccatgcgttctgcagcaccgttggcttggggacgataagcgagcgtcgctcgctgtctctgacccatgagtttgctgaacgccttgaagaagtcggacatgatgcccggctcgcggtcgtggcggatagcctcgctcgcgccgaagcgcctgaacaccgcttcctcgtacgcctcggccaccgtctgcgcggttcgtgacgcgttcgctttggccacgacgaaccccgtgaagagatcgacccagactaacagctctgtgttgcctttgtaggatgccggcgacgacggaatatggtccatggcgatgacctggaacgggtacgtcgcgactatgttgcccggcgactcgccctggatggtcggccgaccttttcccgtctcgcagtctgtgcattcgccgacgtagcgctggacgcttctgaagatccctggccaatggaagtggcgcctcacgcgctggtatgtgcggccaataccctggtgtccgccttccaggctcgcatgattgtggtggagtatatcctccctaagagtctccgggatcaccagcttcatcatcacattgcgatcctcggcggaatcgtcgtttctcggctggtagtagagcagcccgccttcgccctcttcgtactgaggtgcaagcttttggcaattcttcacctcgcgccgagataggtcaccgacgtcgccgcggagatacttcttgaggttggcgatccagacctcttcgtcctgggcgacgcggctgcggtccaggcgcagtcgttgcaccaccagctcctccaggacttctggaggtcggcccctacgtgttgtcgtgcgtgcggcagccgagcgcgtcgtcaccgcaaaactggtgctgtccggcgtcccgcgtccatggctacctcagcggggtcatcagcgtcgagattatccgcgtcgagactggctgaagacgccctatcgggactcgatgcccgtggtcggatgacttcttccaagccattcagcgtcttcagatcttgaatctcctcgggactgtgcgtgttgcggcctccttgacgctgcagagcttgtccagccagcatgtcggcactcgcgttccaatatcgtcgtacgtggaagcgctcgtggtgcggccatgcctggagtgcgtttcgcgtcttttgtcgcagcaggttcagccccggggacttgcagtccatctcgtcccgcatctgcctgatgacaaggttggagtctccgcatacgacgagtcgggtgacgtcgtcgagctcctctagaagagaacatccgagcagtagcctgcggtattccaccttgttgaccgtgaggttcgtcgcatatcccgtcgcgacgcacacgatctcccagttcggcagccgccaaatgacggcactgtatgctccgccttctcgcttcgccttagccgatccgtcgaagctcaagacgtgcaagacctcgtcgcgcgccacgtcggggactggaatgactacaaccctggacgcccgtctccgtggtgcgatctcttctagcgccgcgtcgacgaaggctcacggggcaatgctcgcggccagcgtgccgaggagttcttcttctcccttcatggatcggcagatttccaacttccacggcgagaggatcgcggcccactgtgacagtcgcccctgtagtcccttggaccggaacaaccaggcgagcgtcgtgtgacgtgtcaggacgcggaccggtctctctgctagcatcgtgtagtactcgttcaagacgcgcaacagggccaagatctccttctcgacgatgtcgtagttcagctcgttgtgcttcagcgtacgactgatgaacttcacgggcatgtacaccaagtcgtgggtctgcgtgagcacccctgaaatggcccagtcgctggcgtacacgatcacaacggattctcggttcgcgtcgaagtgtttcaacattggggtctcggcgagttttgacttgagcgcgtcgaaggcgcgcgtcgcgtgcgtccacttttcatgtcagcggacgtctgtacgcgtgacgtactcgttgaagtcggtctccgtcagcgaatacagcgcagttgcatacaccgcaaagtctgcaatgaaccggtggtaataattgaggctacccaagaacgattgcaggcccttgagcgtgcgcgggaactcgagcgacgtcagcgaccccagattctttggcgtcgcctcgagaccgagtcctgagactcggtggtccaggtagtcgaccttggccatgccccactcgctcttctcgacactgatggacaagtgccactgctcgtagacatccagcaagcgtttgaccttctcgcacaggtcgtcccacgacgtgcccccgatgaggatgtcgtcgatgtacgaccttcgtcccagaacggagtgaatacctggcttcaccggttcgccatcttcaaagacgtcccgagtgctgccatccggggacagcttcatgaacccgtagagcgcgttgtcgatcaagcgttggtaaatctgcggcgcgttgcacaggccgaacggcatacgcagccattcgtacagtcccatcggcgtgatgaaggctgaaatgagccgggcccggtctgtcatggggacgacccagaagccgcttgccatgtcgagggagcagtaccacagatacttgtccaagtcttcgagcaagtcgttgacgagcggcatggggtaaatcatcaactgtgtcagcccgttgatgagcctgtagtcaatgcaaagccagatatcgacgccgttcttctttatgatcacgacaattggcgacgctcacggcgacttcgacttctggatcatcctcgcgctcagcagccccttgatcaagtgggcgatcttttctcgaaactgcggcgggattttccggacgcgttgcgcgacgggttttgcgtcgcccacgtcgatgtcgcagacaacccccaaggcggctggcggtaaggcgttgcctttgccgatcaaccacttccgtcgcttccagatgatttggcgtagccgcgtttcttgtctcgcggcttcctcgggcgggagtccagtcggcatgccgaccttcaagccttcgatcttcacctctgcggttagcgagaggtctggcagcactgccatctcagactcgagatcgtctgcaaagaggtcggacccgtcgtggatgaggaccgcgtcgtcttcctcctgctcatcaggtttcgcctcgtcgaatttcggctcggcggtttttggtccgtcgagttttggctcgtcgagttttggcccggcgagttccgactccggcgattcctccatcgcggcgcttccagccacagtcggaggcacatcgggttcgccttccaccgcctcctcgcccgcatccggcttgtggtcgtcggacggcaagtctacccccccttcccttcggcgcttccgcgacagccgccaacactggggttacggcgcgtcgcgtcccgagttgtctcggctccgggcgcaagatggctttatgcgtcgggtatgaggggcgatccgtcatcggtccgtcgagctcggctgggatccagttctcctccgcgtcgcacgtcgcgccgtatgccagattctgccactgctggtatcgggtggagccccgtcggacgaatccacggttccgaggctggccgtcagacggcgtccaccacccaagcgtttcatgcgcgtcgagggttatcgttgcgtctccgatgttcgtgacacgtaggtacgtcttccttccgactcttcctttgacaaaggtagtcacccacgactctgcccgtgtcacccacaggaacggcgcgtttccatccggcctcagcaagacttcatgcgtgtctcctggttctagtctcacaggcgtcttgacgttgaccgggtgcatccgggcgccgtatagcggtcttcgtccgatcatctggatatgcacctcgtcggggaggcacgccgtgccgtccgcagtgtcgatgcgcactccagcggccaccatgaagttcattcccaggattgcgtgttggccgaccaagtcgccgacccacaggtgcatgtagtacaccaagttcccagccaaggtaatcttgactctggttctccccaccgtgtaatatgtctcatcacgaattcccacacactcttgcgtgatctccgtgtcaaccaggcagcctacctcacgagcaaaggtggtgtccaggatggacacctcggcacctgtgtcgagcaataacacagcacggcggttgttcagctttccatgaatcttggcctgcttataccacttgtgcggcgcgtaatgtttccagtatccgcgtcgctctcctggttgcaagtcgatctcgtccagaggtggttcacgcgcaaactcgtcgtctgtcgtacgtcggaccgctgagattcacggcgcgcgtccccgcgtggtacgttccaggttggattcacatgtattatcattcagggaagtcgggctctcacagaccacttctcgcgacatcttggtcacatatgcatagacggaaacaggtcgctcgtctcgtactggtttccaagccagcgagcgtcctagtttaacatcttctcggcggccggcggcagcattcctgcgtgtttattcggatcaaaccactggcgcaattggttgaagaactcctccatcggacattccccggcttcgtgcacgtcaccgcaggccttgcacaccctcaagcatcgctccgtcgggtgctggccaccacacttctgacacgtcaacaacttctagcagtctccttcggcatggcgacgtgaaccacagtggcggcaccgcgggcggtcgcgtcccgcgtcatcggggtcgaagttgcgactcgccggctctcccggcggggcctgccccgcgacgaacaacttggcgcgttcttcgtccccctcgtcttggtcgtactggcgatcgtcgctgtcgcgactttcgcgttccgagtcgtactcgtccggcgcgacgtgaatcccatgcacggcgcgcgccggctgagtcggcggggtcggcgccttttggcggaacttgttcgagccgaagagagtctttttctggtgggccagtccccgttgtcgggcacgcagcttcttctctagcgcctcggagtcggcgacctccatcagcgtgagacgcgaggcaagttcagcctcttgtgtgttcagcgtccggataaaatgctcgacgtgttcgcgcttctcttcagtcgtaccctcggcgtatgggatgttggtcctcaagcctgcgacattgagtcggtacaagtaatccagcggagtctcatcggggcgttgagccgcgtggtagtagcggctggccattgacacacccttgccgcagtactgaacgcggaattgctccatctgctcggtccatgatttcttgaccttcttgggcaactggagataccattggcgtgcagggccgctcatcagatcgctgaacagcccgcacacttcctcaccggtcatcccgtcgcgacgcgcagcggacttcagacgattgagccacagcctagccttctcttcaccggcatctcgtcccgagaactccttcagctccggtgaagccgagaggcgaactctcgtaagcccgacaccggctgtcacggttgagaccgcggccgcggctctcggtgtcctgacgtccaagtcaaacagatcgtcggggttctcgtccacgtcgcgtcgaggtccggacctcgacgagggacgcgagctcacagactccatcgccacatcggctgtctcttggggacgtgtagttgctgccgcagggtgtgtcgactgcttcgactccaccgggaccgcggacgtctcggcgcgtggggttcgcatcatcgttgttcgcatcaactcgattatagactcctccagagccttggggatcgctccttcggctggtttcgcaacctcggcgcgtgccggcacagcggagagctgcataacacgcggtggtcggttcatgggcatgcgcttgggcggctcgaaactactgtcggagtccacgctcgattggtatcgaggtggaggcgagggcgtggtcgttgaagtctgggtcgggcccgccgaggaactcggcgcgtcttggcccgtcgcggaactcgtcgcgccttgtttaacgaatccggcgagaatcgtcaagggctcctgcactacgctaatcgcgcgctgccaagacttgatgtcccaatcgcacagcctctccatctcgaaagctcccaacacgaaccccgagtcaggcagcatctggaagagagtcggcgcggcgtgggcgacgctggtgaggctattgaagtccggcgccacgaaggggcctgtgaagttgctcatcaacatgggcttgaggaagaccaagattgggtcttgctctagcagccggaagagctccgtacgcgccacgacgtaccgtacctcctcgacggtgtactgacgtcccgtgtccttgccttgcggcttggatagcaactcccccgccgagtccggcgcgcgcagcttcttcttcctcttgggcgacttgcgcttcgtggctgccttggcggtgggttgttgttggtcgtcagcctttacaggctttcgaccggtaggaccgtgacttgcgtcgcggcccttcgcggctccctcgtcgggagccgcatcgggaacggcaaacggttctttatcgccctcctggtcgtcgctggccccgtggcctgtcgtgaaggttccctcagagctccacaacgcgacaggtctctcactgtgctctcttgcggtcggcgaccttccagccgactgcacacctgcctccgatgcctcttggatcgttagcccgtcattcgaagtagtacgcccgggtctcggcaccattgtggagttgcggcctcacagaaatcgcggagttcgtcctcgcacaaacccgacgcgtccaatctgcggtcgtgacggacaatttcccggatcttgagtagcgtatcttcgaatatagagcccaagtcttcgcaagcttcagagttagggggttgagtgggcgcttgttccttgtcttagggcgtcggttgttccttgggcgtgcggacttatcgggccggcgtttcctcggagaccccgttgggcgtgcggcgttatcgggccggcgtttcctggggcttgttgcgtggcgttatcgggccgacgcggggtcttgtgcgcagcggttatcaggccgtgcagtccttcgtctaggctgcgcgttatcgagcgcctcctaaccggtatacgttttacgtgccttcgtttccagcacggggtttgagggggtgagtgcccgagccagcgagcgacgggggggcgcgtgttccttgcggctctgcttgccgacgcttggtggttttcaagaacctggcgatcttccggaggggagaggtctgagtggttcagagaaatttcgggactgagtacttaccctatcctatgccctcactactggctattccccactactgctcgctaagcctatcgctccgtgcctatccttacttctgtcgtgcttgcactaccgtccttcaacctgatttacgtagcataatcaagacttgggcttgacggggtttctcgacggggtttcctcgacgggatttcctcggcgggatttcctcggcgggatttcctcggcgggatttcctcggcgggatttcctcgacgggttttggggtcgacggggttcgcatagccgggcgtgcgaaccggctcgtcgaatcagtcaggatctgcctgattccgcagctggtctacgtgtcgcacggtccatcaccccgtcaacctccctggcgatctcgacgcgtcgtattccgtccgcctcgtcggctgacatcactctcggtcactcgttccctatctagcagaaaaaagaaaagttgcctttttaaggggtttggagcaaaaatattcgcgttcatgattgacatcccaacaagcagcgactttagagtggagttagtattactagttgcaagttgacgcagcgcacaagttcaaatgaagccgatgtactcgaaagttcgagtgcattacccactactcaaaagtccgcgaaatgacatgcgttacttccgctttctaaaagggcagcctaagctttgcatcctgctttgcacacgggctagcaaaccacatcgctttgcgcacggctgacaaaccgcagcgcttcgctcggtttgtgcgatttgactgattctacatgtactgataactggtccccatgatctacttataaaagcgcaaattgtctggatctacttgtattgtttaatcgagcgaccaaagtgattcgacgctatcctttgctagctccctctttaagtttgccctgcctctgagatcgcgctgatggaatcttgaaactgaggatacgacgacagatattgatgcgaacaatgatatgcttttggtgaacaaggcgcaattttaacgcataaccctacccctaccccctctcatttattggctggctctgcctctgcataaggtaaccggtatgcaccatatagatactaaggcaaattgccggtttagtagaattttcgatagcaacttttagctaaccgccctgcttgtaatattgaccgcaaggtactgagtgaggtatgaaattgtagctcaagacttcagcaatcagagacgataccagctaactaaatccatgcaatattcaacacatttaacgcaagctactaagcaatctcgaattcgaggttgtaccagtttagtagagattttatcagggagtttgtattgaaataccagctggttgcttccttgcgccttgaataattatattatcaaccaataatggaagctatacgcgaaatactgtttgttcattggtcaatatgacactctactaaaccgctcactctctactaaagtggcaacttgccttataactatttgagttcgatcccgctatatttatgcatttcgcagaatatattatcttctgtgcggttaataaaataacgcaacctttttgagtccttattataagctttatgaaaaacaaacttttcaaagtgtgaaaacatacggttttcgctaacgaaaaatcattgtgattgggtaatgacttcaactttaactgattgtaagatattccttatcatccgacttatatcttcgccaaaacttaagctcacttctgctcacgtcgctcacgaatcattctctctgcttctccaggtgcaaccccgggttaatccttgacgcgatgctctgtgctggagcgtttcaagggtaagatcagtctctgatcaaatgtcgattattaaaagatcaacgtaagctgcgagttgtgtccaaaacccacaaatcacttgaacctcctggagcaaccgcagcaaaaacacaaatcgacactaatgatttgcaggcggcttggtggtcagacccatctggtattagtgtccgtagaaataggagcgaacattggctgcctccgtccttgtctgtgtcgcgatcttcgtcagtatcatcggtgcagtcattcataacaccttctgcgctatcccttgtgaacgcagcagcgggattgtccatctcagtggttgcagtcggcagtttaatgtttagcttcgagcggccatgtaccgcagcgggaagtgtaacaccgcttcttcggaaatcggacccactgcagttcttatcgttgacaccgtctcaccgatcaaaggccacgatccaagtagagcaagcaagctattaggatgcagcttagtaggcaacgcgaacgtccaacacagccgaataacaaataataccccgctcatggatgcccaaatcgtcagatacactatcattgtgctaaatagctcttcttcaagctcgcggtcgcagcgatacacgtcgtctgagcgatccatagccacaacttactccaccggcgatttactagcaatctatgtttgtgtaaagtaagagtgtttttgtgcgtggctttcactacgtcggactacttgctagacactccatgggcagagatgcaatccatagctgggggcaatccaatgcgtgggaagcacagcgatacaattcgaagtatggtatgagcgtacatgaaaaaagcgtggtaaatggctttcgtgttgccgtgttcgtcgtcggccacggcttaaaggttgctccctcctcttgtagttgttgccgttcctaccttcttttggtgcggacagcatcaactgcaaaactactgggattgatatgatgcatgttctgttataattcgtacagtgaggattactatgtttgattttttcacaggaggtaaggaagcagtcagttggcggatgcaagctgttcattcttgataggttaggtaagatttacaagatcgcgtcggtgcggtacgcgttgcagcaagaatactgcacgcagatcgagctggcgtctcctggtatttgcctacccatgaaggtcttcgcgatgaaggcggtcaagaaccatgtcagatactgatttgaagtttaatgacgctggtacttttattcaattatggtgtgctgggtttttatagaacgggtacatgtgttatcatcttgaacagtcggttggatcccgaccagtcatcgcgaacgtttcgggatcccgacgtgtcgtctagcgatgcgccactcgtatacaacacgtaatttcctattttgttggagctctccaagcacgcttcatttcttctcaaccaccaagactggcgaatttgcggggcaatggactccatgaataaatcaatgttgttcagtgccttgctcgcaatcgaagtcgatgccttcagcgcaacgcaaggcagtcctaacgcgcctcatctgtgtgtcatctaaacaaagcttgaaattgaacttgaaagtgctgttgaactcacgaacttgtcgtgcggtgtgtactcgtaaacctgcagggtatgatatcctcttaccgttaagctttatcacctttgaagaatgtcttcatgctgcactgtttgctcattgcttcgtagcgtccgcgattgatggtcaacgtgtcgtttgtgtaaacggcagttaccacgtacgggccttcggttagttgggcgggcttcggcaggttcctaatgtccttcacgacgagtaccttggatgcgacgcgatactcgagcacgtgtcgagccctgttctcgtgctcattattgcgggtgtttgccattccctgcgtgagtatgtcgtagcggggttagcggtgaagagcatgtcagtgatcatgtctcgctgaaccacgacctcgacacgagatgagtcggaaaagcgttgagggtcatgtgcatagcagcccgaattgcgaaggctacacttggcagaatttggggccattgctgctggtcgagctgggtagtgcgagtcatgctccccacgatttgatgtacacgccccagcaccgcatttgcctgcggtttatcgccgcggtgggctgtgactgtagtccgtaggacccctgcatcacctgaaattattttccggcgaactccttcgcttgattatgaatcactctccatgaccgtgggtacctgcagaaccaacactcgtcgagggcgagcgatgccgcttttgcaccttggtccttgactggggcaatttcgatccaattggtggtgagctcaattatggcccgggcgtacaacttgggcgcttagctcgtccgagtaggagtaagggccgatctcgtccacggcgatattggaccactcctcttgtccatggcacttctctggcaggagtctgtattgttttgggggcagcttcaacatttgacacgtggggcacatgcagacgtagccctcggcagcccaacgcattcctcaccgatacactgacttcgataacgtgagaaagctatgatccatgcctgggagcaggagcgccgcgtggtagaagtccaatactgcagcgcgtagcggagatggaatgataacttggccagacttggatagcattacattatgcacacaaaacggcttgtttggaacttccgcggatactgcacagctgccacttgcaaggtttcgtcgtcgctgtctgactgtaaaatggtgagtgcatcacttccttcagcacgttgcactcagtgccatcgttttcatcttgtgccagtcaagacagcgcatcagttaccgcgttgccagcgcctttgatgcacttgattgtgagggcgaactcttcaatgatgaagcgccaacgcatgaccagcggagaagtccgtacagaaccggttcttgtggtcggtgtgaactgtaatcctttggccaaggagcatcgtgcgaaactccttcagtgtatccatgatactgagtaggtcctggtccatctctatgtagttcttctgagctgacgcgagtttgcggctgtaaaatgttagcggtttgcccacctgcgacactgtttccaccaagcgaatagttcgatccatcgtaaagatctcgaacggctgtcgtagtcaggatatggaaacaacgtggagcgatgtctagatactttcagcttgccgaaggtggctttgtgctcagccgcccaggtccagagaacgcgtttcgacgtgagacgagtctatggagccatgagatgggcacgttggggccacacatcaaggcagtagttcaccagtccactgaactggcggagctctgtatagctcgccagacccctctaccgctagatagcagcgaccttcccagcctatggcgcaattccttcggtcgtaaggcggtacccaagaatgttagcctcctttgcaaccaacttaccgttcaatacgttgatagtgagtctagcgtccttgagacgttgcagcacgacttccagccgttgggtatgacgacctcatcccggtagcagcgaactaatgggaaatttttaagtaagcgggtgatgcgtgcttggaagtgatccgtggcggctgaaagtttcatggaaagccgtaaccagcggtacttctcaaacggcagtataaaggctgtcagcagcgaggcccgatacgtgatatgaattacgtagtagcccatattctggcccaacactgtcacaaagacaaatcgcggaatactgataaacaccttgttgattttgggcatggatcaggggtggtcaacccgttgcttgctgagacggcacgagttgaaaacccaagcgaacggtctggttggccttggacagaacaaataatgccgaagccctcgggctgctcacgtcgcgagtaatctcgcgcagagttgtaattagcgttaagaggtggcgcatcgtcgcgtggtgctcggtgacagtgacgtcccgtgtctttgcaaatcaggtcgatgggatggactcgtgcgtcttgcagcgcgccatttgcttcaagacgatattgaagttctggggtgtagctcccttaccattagcagcagcggcgctgaggaagtcgagatatcacgcaatacgaggcgtgcgttcaggagccccgtatgacctccctggaccagcccatgagacgaataattctctcgaaggtcttgagacaggttagccactcctccaccgtgtctcgaaagctgaaggtcttgatcaaaaccttcataggatccacagtgttgtcgtcgttgccgatcgggtcttagtaggttagcgtgacagcgccggactgagatggtcaaccatggaggtttggaaaccggatgaaccgctacttgagggataaaccttagccaatcagcgaccggaacggcaaaacctgtcagacgaatgttgaacgatacatgtcattagttcagattagtaacatatatttaaaaaagtctagccaccagttcccaatagctcgcgtaaagccaaagaggcgaccgcgtggcgcaggcgtcggccgccaagtccagcagtacaagctgaacgccaagtctgttgagaagaagattgctgtcctcgatttagatgctacggcgaagaagatgtgattgacggttaagcactcctacccaacgcttgcccctgagtgctaccagagaaagtgcacccaaatctagcgctagagtaaagagagactgaagttcgaagctgctgtcagcgggcacaagggagcccacgaaaagctaccacaggtaggcgttgtcactattttatggaaggcgctggaggagattgtggtgtgcgtgaacgatttgagggaagatgcggttcctgtctcgcctagcatgctggaggtgaaagcgcgtgaggtggcaaaggccgctggcattaaagacttcaaagcctccgacaagtgggtccttggcttcaagcgccgtcatggctacagtctgcgcgtacctactcgccaagtacatgtgtatcctccctacttagcggtttattgcagctgagttctcgtattcgctgtatacttgtttctatcgctgtcgcctaaaagcatcaatgttacgcgctcattcgaagcaccgctgcagcgaacccacaccgtttgctcgccctttttcgatataattttctcggctacgtactcgaaaaacgcggcttgaaaatggactatatttggttaaatagtaattaaatagcatttacaactgttaccggtctggtcagcgttataaacgtgtgtaatactcaggacttcgtagttatgaaagcgaggccatccactgttgagaagtctcaagaaaagaatttgcaggacagaaacggatttacggtccatatttggcaagacgtctgccccattatgaccttgccgtcctcggcaacaaaaacaagtaacgtggaaggggttttattgtataaaataatttgttaatttaattataactgtattgtggtttttgtagggtagtggaatcaagaattttccggtgaatttcttcgacgccactttggtcaccgcccaggaccctttgagtccatcctacttctgtgggatgatttcaatgggcaccagacggaacaagtgcggcggtacgcgaccacgatcaaggtactgctactggggatgccttcaaaggcaacgtcggtttaccaaccggctgacatcgcctagaatttcccgttcaaggcaattttgcgacggctgtagtacgcggacatgaagtccgagatcatgcagccccatatcccgggcaccatagtagttcgagcaaagcatcttagcagaccagccagtcgtctgtgacttcggcttcggccagcgctggtctagtagtgtaggttgtcccgatgaatcggtggtgtcatctctgaaggatcctgcaccgcaggagcgtatttgcttgcgtcacgtggttgtcggctatatctggagggcttgcacttgattcatgctgtgtccaagctcgacttgccgctgccaatgggttatcagtcacgatacgcagtgccaatgcacattctcctcatcgggtatgctcaaccacgtcgaaagacgtgcgatggcaaagattaccccaattgcttggtccctacaccgtgagacagatcctattgcatatctcgtaccctcgattcctatccttccgcagttcgcagcaccggtcgcaggcttgccctgtatagcgcaatactccctgcccagagctgccatctacttgacggagtatcgtacctctcgcaattaattaggcaagagtagattaaaaagtaagtagattgattgagcagttagaaaaatagctagccacatgtaggcactttaaggaggcggacttggcgtagtagcaatgtgggtctgagaagttttcagatattttcacctttagaagcattgatcttatctttatgttttcgttaatgatcagacgagtatgtccttatcttcttatacgctcattatagtatcagaatttaaaaaaaaagtatacaggatgcgtatggctcgtcatcctcgaaacgacatgtggttaaacttattctgagcttatgattaaaatcaggtgttttcgcatcttcataaaactgccatggtattgatttcatctcattctagtctgaacttcagcttatcacgaatactcaggctgctggtactaacatcattttattttcccgcattactatacacctaacatccgatggacatcatcgtaccgactatagacttcgaatgatcgtatgataagcatcagcagggataaaacgcatccataactgttatgcgattatgaatgtcccttgataagcctagccctaaacgcatacccgcattaagtccatcacttgagtatctcacttccgaactcaccatcggatccaagccccgtgtcaccgtgtatttaaatgaacagtgtacacagagtaggtaacccacttcaatgtattactcgtttggttatcatgtattcctatgcctagtactctagatccctcctcagggcctgcaggcaaaagaggaagtgagctcatcttaaaacggcgcccttgactcctcacacctcggtctcgtgtcgtcatcgcactattcatggttggcaggcagctctctgcctgaactatctagcccgcagctggtgatctttctcatacttgctaaataccaatattaacatgcttgagaggttttactttcagttacaagagtactcgacccgcagacaggcggagcctgccgccactctgcgatcggggctcaatccgcgagcctaccttaataacatcgagagcatgcccatcaatcgcaagatatacaaggacagcgttcgagctgtgatcggtcccgtgtatagcctctcgtatggcaccaccctaaagatggttctacatcactcgtgatgaagcttagctactaatgatattgagaaccatcgacttgacaactaagcctctcgacgcgatagtcaagcaaatcatgagtagggtgtcgtagaggtgacgttcaagatcagcgacaagctcgagtttaaggtcagtccccatcctgcaatcaatttcgatagtggttgacaatttgttaagtcctgctcagcgcatccgatgtgatgataaaatgaccactatttttttcaaaggttgaggcctgtataagcaacgttaacctacgtaagtaaagtaacgagctagatataaaatgaccactatgtaactcgtggagtcaataatgggtgctaaataccttatgtacgttggtgtgaagagaattgggtaccatgcatattatctttttcgcttttcatatcaatcaatatatgatcttgatctgaatgcgatgttatttttatgctaattctaataaaaaatgacattttattatgatctgagtaaatttcatcacaaagcgtctgtgaggctcgttctgatagcttaaagcggtttaagtgatatgaaggtgtctaggtcatgtcggtttgtctacttcgatgtgtgcatgttggctggcaaattgtagagtgtattgggggacgggggatattgaaagccgtggtcggaacaaattagttggtccgtctcccacccaagatccccatatgtctccacaccacgcttcatgttaagtgcatatttcgtctcagtataaatcactagagttcaattattatgcagtgtatgcaacagccgcaaggtctcacaatccgcaaaactccttcttggataattatttgtagtataacttgttgttcagggttaattcgagtaaatccccgcatgaagctgttgttggagtgttggcgacctagtgcccttggtgtgaaaggtgaggggtagccaacttgcaattttatatgaaagatcaaggagtcgggctcagaagggcgcttaggttccgcattgcaaactttacatacgtcctagtgattcctgagagcaatagtaagacggtaatccaacgctcgtgaagttcatgcgaaatacatccttcgtcacaaaataaccagagtggtgacagcgatgtcaccattaaactattccgacagcatgccaaacactagaccccagttcttcgtccggcacggactatattggtcgttcactagtcgctttacatctgacatgctcaatgccgaatcatcgaaagcaacactaccggcaaatatgagtaaccgtgtctcccacacactcggattcaacggcatcacggaacgggacatcggcggccatctttgttcgatcaccttgtatccttgattgataacgttgatctattcgttttgcctcttcttttgttcatcagcttgaaaatcaacgcatgcggccacgtgctttccagtgctatgatatcttttctttacgatggatgagtgatttcttgagctacgcctcctagccgtgacatatctcaaggaacggcgccagttcggtcttttgcgacacattcaacagggaaaacgcacagcacgctattattgcttcttatattcataccttgtcataccatcaagcatggaatagttacaaccggttgctcgtaagtcgaccacgttaactgactgaccgacgcgacggagacttgaaggtgagagggcgcgttttcagtgacatatgcatggtgactacccagtagccaaatggtggctttcgggtggtgtcgcggcagaggatacggtagataggatatggcggtcctggacatggcactcccgactgaatcaacgggagactctttcgcggttttcaatgtctaacactgtaagctgcgagagcgtttgtggtgcaagccccagagtattacacagtagcgtactacgtgctagcgctcaatggcgtgtgcggtgggcaattgcagctaactgtaggcattgtggcaaaagctagacaaaatctcaaaccctgcaactcttgttgaccagcatttttctgctcctcctctgctgacagcacaaccgtgagcagcatcctcaacccacctcaagctattccttttataacaatgagcaccacagctctgacgtcagcaaagattcacggaggctatggctcggcagcacaatacgtcctcttctgggtctaaacagaatcaagacctgaatgagtggacatagggcgaaaaggaaatcattcaatgtcacctgaacaacagaagagatcttgccgtgacctataatcaactgccgcgtcgaacggaggctaacgtacataagaagatacgactgacgaagtagaaaccaaaacaccccggctctacaaataagcttaagtccccgctgcctccccagaagcaagtggaaccaactccattatctgcaccgtctagtgggcccgagcaatagttctctggctccgccgacgtgtactgcgagcagcacgatgcgaacgatggtgctgatgagcacggcgacactgtggcctggtcgtgactagcaagtgaacacggacggccttgcctacctggcgctcagtgaccccggtccgagactagccgcggggcgctaccgattctgcttaccaacaacccttggctactgagcatcacgtccgtgttggtaagcggcaaaccatgtatgcagacgttgcccccagccccaccgatgtgtgatgtgagcagctcgccagtaccaacacgaatcgctcacggatcttaggcatagtgaaaatgttttggttggtccccagcgcaggcatccaaactgtggtatcgctcacggtccatccgtatatgcttataatcactacgggcatgcatgcgggtacatcacttatctcgaagacgaagaagaagatggccaaggaaggcactgcgcggcgaaacgagccgcgcacgcgggaacgctgcaaccaacaagaccagtaaatgctgcagcaagctctgcatcaaggtgcttcatggtttcatccgccactgcagcagtaccaagtgactccctggtatccgccgccaacacagcagtacccatttaacccgtggttctctgtaccgcagccgtaccaaagtactctgtggttcccctcgccaccgcagtcatacccaggtactccgtggttccctccacaaccgccattagcaatagtcccaatctagccatcgagctgtgacactgcctacgcacagtattgtttattttggtaacatgttttacacctagattgtgggcccaatcatgtccactgctccgacgagcgagtatgtattcgtcacgtcagattctccgacaggggttacgacattgtttttgaaatgtcaatagaagttaagccatctaaccgcaagtcagtaaagcccgactccgtctccggcgtccacttggcgcgaaaagtgacgctatgttctcccctccaccgacgaatcttaatagcgttctccatatgcggcggccgacgtaccggtgcgtgttgctaaagcgttctgctatcttggccgcgttgcctccgcccgcaactacacacaacaggtgcagaagctgaacttcctgactgccccatgtgtcacgcaacattttgaggaccgttttgtactacacccccccccccctcataaattaaaaaagaagatatgtgtgggacttggtttgaattggtcgcgacttagctgtgacgatgcccttaattcacgatgctcgaatccgtgattgcgggactccagcagcctctggtggcgattttccctctacaaactctgggactgcagtggaaatccttgcaagtcatgcgtgcaccacgggcacttgtcgagcgatccggtagtcgtagtgccttgttgggtatccacggtggttgcacttgccacgcacagcgttggagaagttgactcgaggtgacttcgctcgtggtagttgcggcgggagttttgctgcaatttttcaggaatgacttgcgtttacctggggtggagctgacactaaaaaatgccttctgccgtcgtggccagcgacttattgtggtatttcacggtcttcattatttcccgacagggggctcccaactgcatgtttttatggaagtgagtagggaggcgcggtgttgtggcgacacgttcttgacaaggaagctagtgagtcttctgcgtacatcttgatcacctcgcagtcatccatcattgcagctttcgtgctatggcgggcgaaatatcggcgaggattcggtggacctttccgtggttactcggagggcagtggcgattttaaggcagcgaaagtagttgcgtagagcaagttcatcgaaggacaccgttttcaagaaatcgaggcggtttatgaaccgtgtcgacgctgcgattggagtagtagtaagagtagcccacatttttgcgtttaattcttgttgtgcatcaatcaaaaccaaatcaagcgtagcaatggattgttaaatatccacccgaattgtttagaatttgcgggttaaaatctatcgatgactcttgggacactatgaacgggcgtttctgcgcttgtctgagcttacgtcaaagcttggaatgattatattcggtgtggatgtgctctagatatgctctatattaaattataagaaacttaaagataaaaatgacgtcgtaacttcaatttgctggcaacaaccaaccctaacaatttcaccatcaaagtgaaaaggtctgcaccagctcacaagcagctcaaagcacgaggtaggtgcattccagtggtgcttaagacaatgccctgcgcggcaatatactccaaaacctcgctcgtaacctccaagttacagtcgatataggcctgaagggcccatcctaggcttgagcgcacttcgttccgcggggatccgctaaggagagccctcatcgggagggccctcgtaatagagtcgacatttgggaaacagccggttgtgacaaacgcacatttgggtcattcgtaataggtacatgtaccaaaatcgtcggcaacgctctggggaaatgataccgttgccgacgatcatagctctacaataaataggcatccgagtcgaagtttactgtagactaccggcaaataataagagggattgagtgcttgccaatttccagatctcgttgtgctgatggtgcgccctgctgttgcacaagtgtaacagaaatgcaccttgcagaagtgttacacttctgcaatgtacaaatatgtaacacttcggcaggatgcacttatgctacacttctgcaacttataccttcgtaacactgctgatgaattacttattagtaatgttaatagataagcctatcaaaacgtcagaagtatagcatggtttccgtgttagctttctcactacaggttacgtgtaagttaacctagctgacggacttcatccgaagtaatagtgtgcggatgacattttgcgtacacaagccctcggctttttcttgactgaagccacgatatttccttcgacccgaaggataccggtcgcatgagcagtagaggccacgttgtcacaggttcgcttttttgagcttgaaccgctgcgaggaagttgagggcgaggcgatgagttcacatgcgccgaagcgggcgtagtattaacggtcttgtcgctcgtgacggccgtcgagagtgcgggatcagctatcgcgccatcagaattagggaccgtgaccggcaggtctggtacagatgcagaatgcagcgaggaggcagcttcatcatccagctcaggctatgctcccaaatcaccagtacgggaagaatccgatccatttaccggcacagcgttgccacccgggtcaagctggccctgcatacattacaagttaaaaaaatcgggttaacagtcaacgtcgaaataaattagttttacatcataaagttaccttttgaaggggtatggctcagcccaacagcaagcatgctcgctacttcactgtctgcgcctcggacttctatggtggagatgcttcgcgttgcagcatccggggctgctgccattggtgccgccgagacccctccgtagtgcacacatcgctctcagcctcgctcgtcgtgctggtgcagctcgtagacacatcactacaaaccgcggagatcttccccgcagcatcaccatcggtagcgtcgtcttcgagtgctgcacttgccctcaatgtcccggtagatggccttagcccgtcggacttcagaaggacaggtggggtcacctacagcagtggcgcgaaccgttagtatatacaccaactgcataagcatgccaaaccattattatttacctgctttctcgcgtttttaagagcaaagaatttgcggcgaagggactcgacatcgcgttggggccactctgctggcaggttcctgttgtacgcatactgcaattcatcccattgtgtagacccaagaggcaggaactgctcaacgaacgccagcaaacctgtcaagcacagcaaaatataggtttcagcattaaccatacagcagcactcacttaaagataatgtacgatccacttgtggcgtggtgaagcccctcggcctgtagtctggcggcgggtcatgcgatagagctgaaggtgatgcaaaagaagtggcgacgcgaaggagtcgtaaactgcgcaacctgtgactggcagtcggcttgccaaccagccatcgacgtggtaccggtttagtggtacgaaaagtgcgaagcacgtcgcaatgtgcggcgacagttgccgtctttacattttgtgatcgatttgtgtttgcatttgcgtgcgaaatgtgacagtagcaatttcaggttctgtgcggtttttggaagagctccagtggtagaaagtccctataagttgatggcggcggtcgccatcgctgatttgattcgtattttgtgcgggggctgataacgctggttcctggggctgaggggcgcaatggtacatccaagcgacgctatctagccatgggtgtggtgacagtggtagaaagtccctataagttgatggcggcggtcgccatcgctgatttgattcgtattttgtgcgggggctgataacgctggttgctggggctgaggggcgcaatggtacatccaagcgacgctatctagccatgtgtgtggtgacagtggtagaaagtccctataagttgatcgcggtggccgtcgtcaccgatgtcttccaattttagaataacggtttttggtttcgttcaacaaaataccatgtaccattttccaacgttgcggatgccaacgaatctcgtttgtgtcttcctccaatgttgagggataagttcacgacctacaataaaacgtttgacacagcgtatgagcgtagtctgactcgctcggtgacgatcttgtggcggagcgtgcttgaacgcgtcgtgtagcaccgggtttatatcttcgttcgggtcgaggccgactctcgagaccccagccggacagtcaaggtcgaggaagtcaatgctggtacaatggccagtggtggctgtgctgtcgtggtggtgagggttcgagtcccgggtcggctgaatatttgtctgacgaacgctgggtgtgtatacctgtttggcttggcgtttattgaatggggtaagcttgtatactctttatcgggcagattacccgtcaagcgttttggtgtaggtcagatacttatccgtccggttgtcgggaatgggtgattgagacgatactgcaggtacgcattccttaaaaacgtagcacaccttaagtaaatgacaatggcagtatatctaaaattgtaatacctacgccagttagatgtccatatattggcatatgccagctactccgagatgcaccatctcgacctgcccgcaccattcttgctgcaccgcgtacagaaccgacgctatctcgtaggtctccaacctgtcaagaatcagcaccttgcatccgccaagtggtggcttcctacatccgttttggcaaatcgggtggcccgatatatctattaaacaacgtcaacttagtaaaagcaaaacatcgttacatactccttacttcgaccgtttaagcgcccacaaagtcaattgtggtgcctccattcatgtgtgcatatatagctgtttagtgcatgttgaacgctgacgcatgcttgccataaccatcggcgcaggatagaatcccatcctcttctacagtacccatgatcgatgcagtgttgcctgcttctatgaataacgcaatgtatcgtatcgataacgggactccttactccacaatagtaaaatgcaaagcctatcgctaatcatatggcattacagtttataggtattacttggagaatatgtatagaaaggacgaaaggtctacatttgtataataacaaatatcctttttgtttgtacaaaacaacaattttaacaatagtctcatcctccgccattctggcgccgcacgaatgactgtgcgggcagcctcatgtagcgccagtcgtatttggatccgtccgggccgtccaaaattaaacttttttatctgaaaatacagtatatttccatattcctatgtataacaagagttagcatcacgaagtataacaaaaaaagactttacctgggttaagtatgtgtaccttccatccgtgctgacttgtgagccgcagtgagaggcagcgtgcggttcatcatggtgtacaccagatggtccagatgatgcagcagccgttaaaccgtgcgcatggacgccttggggccgagctccgtcttgagcttcgctgcgaagcggtcgcctgtcgccgccttgcgcactagcagccgggcctccctctcggtgagtgccggccgccttcctggtcttggggaggggctgacgctgtttgggagcagccctggttctgtcttgatagccttacgcacaaaggtacgtgctcgacccgtccttcttgtgatgtcgtgaagagagacgccgccgctgtgaagcctgatgatgctgagggctttgccgcgacccatgcaagaagcaaaatgaaaggctcacaggggcgctagccaccgctgcaacatgtctgccagctcggttcctccattcatctaacgtcaagtggccttcattcatttaatatagaagtatgtatgggattgcataaaactgtgtcattttctcggaaaagggtataaatgtgacagtttataggtcttgtggttaatatgcatagaaaagacgacagatccgtttgtgtataatatcagctaaaaaggtataataccagctaaaaaagagaaaattcttttccatttgtataaaacaaaaacattagcaatacatgatggagtcggcagctactgacgccggtgcgccgcctgcgcgcgagctggaggtggactcgagcgatgcgatccgcctcatcctgcagttcctgcgtgagaaccgtctgttcggcgccatgcgcgcgctgcaggaggagtcccaagtgagtctcaacgccgtcgagtcggtggattcgctggccagcgacatctcgcacgggcgctgggaccgcgtgctgcagcagaccaaggcgctcgagtgcagcgccgcggccatgatggacctgtacgagctggtggcgctcgacatgatggaggcgcaagagcgcgacgtggcgctggagctgctgctcaacacgccggcgatggccgcgatgaagaagacgcagccggagcgctacctgcgcctcgagaagctggtccagcgcgccatcttcgaccctgtcgaggcctacgctggctccagcaagcagaagcgccgagacgatgtcgcccagctcttccgcaacgaagtgtcgacggtggagccgtctcgactgctggttctgctgggtcaagcactcaagtggcagcaattgcaggtgaggaagaaaaggctccatgtatggggtgctgaagtgaaggtattgacaggtatacattgtttattcttttgttatgcagggtctggtggcgcctggagaagactttgacctggtccgaggaggagccaagcagaaggtagtggatcgatcggagaagctggtgcgcaagtcggcgggcaagatcaagtttagcaagacgtccatgccacagtgcgcacagttcagtcgtgatggacgaatgcttgtgactggggcgaaggacggcttcgtggaagtctgggattttgaaaagtgcaagctgcgcaaggatctggactatcaggcaaaggtacgaggcagagttatctggggtagttgttgacggggttgatacttaactggtttatttactgggcattatcaggacgagttcatgatgcacgacgtgagcgtgacggctgaggcctttagtcgggacggtgagttgctggcaacaggtagtgaagatggcaaggtcaaggtgtggaaggtttccacagggatgtgtctgcggcgctttgacaatgcccacagtcagggcattcagagtatcatgttttcacgggacggcacgcagctcctgacagcttcgtttgatcatcttgttcgtatccacggcctcaagtctgggaatacgctgaaggagtttcgcggtcaccacagctacgtcaacacagccttcttttcctcggatggtagcaaggtgatttcaacgtccagcgatggaacgctgaaaatctggagcacgaagacgacggagtgtctgcagacagtggaaccgcccagcgagtcgtacaatgcagaagtcgatatcgtaagcgcgatcctggcgccgaacgcgtctggaaccggagaggacatcatcatttgtactcgtacgagcgacatgcaccgcgtgtcgatgggtggtgaagtcttgctgacttacaagggcgatccattcaacgataagaaggttggcaacttcgttgcctgcacgctgtcaatgcgcggcaagtggttgtacggtgtgacggacaagggattcattgcgagttttgccgcagcgactggcgaacttgaaacatcgatgcagatctgcaacgccgatgccttcggtattgcccaccacccgcaccgcaacatcgtagccacctatggtagtgaccgatacgttcgactgtggaaggcgtgataatagagctgccgtactgaaccaaatacacttgaccggaatttgcaggtttttttaacgacattagttcctcgatacctgaaagctcgctgcggccactgctcgtaacttagtacttcgacttgttactttttgaacatcaatggcgagggctcgttgaccccatctacggtacaagagggcattgacgtaaagcatactaagtcaagttgaaccgacggccgaaaacttggtgcagtcttaccgattatggcttggcgtgttgggtcctcttcaaagcttcgctcctgctgaaacacagtaaatgaacccgaagttaggaatcgccgactggtagatttaatgctggacggagccctacctcgtggttgtggtggactggtgccaccgcaaactgattgaactggtgttcgacgtcgagatctctttcatgttgcagctcctggtcttttgttgaaatgatacagcgatggtcagccagggctgtaattttcgagttaaagccatcgagatacaatgactcactccgactttgctgtaaactcgccaccatactgtagagcagaggcacgtgtgtgaagcgcggatcctccgtcactacgaacacaaagcgccaatattagacaaacacaccctacatcaactttgaagcagtttggttcgcactatttagctcgctcgacaggaactggcggtcaaacggcttctcggctggctgcccggactctaaagcacaattccgacccacaaatcaacccacattagcagaatcacctctaactcacgcgaaccgaggcactaattatcccccacctggtaggaaaaccgacagagcgtggcgatacccgttgtactcgaagtactcgcgaatgagctcgttgataatcaaattctcgttcgacagtttgggcttgggcacatcctaacaaatagatagcagcacgtccatcagcaacacaacgccgagttctctatatcttcattagcatcacctggtcgtccagcgccgcgaagatctcggctcgaatgcgagctttgatctggtccagcgaccctcgagccgccagcgtatccttcaacactacaacacaatctatcacccactctctcctccactatacaacatccaatcatgtctaccacacgaaccttccttcaagtccgacaaggacgcctggcctccgtccgcagcgctcatagctcccccctagatgtatccgccgtctccttcaacaatgtgcacgaagcggcgtgaaaagcgccacacttgttttttgtatggttttaatctatgtataccacacaagtatccgttatcgatggtttttaggcagcttggctcagtctgcgattttccctgcgagtgatggcgagcccgagcgccgaagccgcaggcgagcgcctcgcgcgcgtgagccgcatgcgcacgctgtcggcgctgctggacgacgagctggaggacgacgagcagctgcccgaggagtgccgcgcgctgttcgcgcacgtgacggcggccgcggccaaggacgccaaggacgaggacgcggcgcagctggagcagacgcggcgcaacgagttcctgtgcgtcgagtgccaggcgcacgaggccgagctcttctgcgagcagtgccacgactacttctgcgagctgtgctgcggcggccagcaccgcaagggcaacaggcggaagcacacgttccagccgcgcttcccggcgtctaaggctgcgccggcggctgcggctgaggctggtgcggccacggcggacgtggagatggagagcgcgagagacgccgtggactacgatgtacgacgctgcagttgcaggctgattgctggagctggaaggggagactgagggcacggagatgctgtgtgtgtgtgtgtattgtgttggtgctgtgtgtgtgcgtggctgcgtgtagagcgacgaggacgagctggacggagacacgagtagcagcgaggaggaagacctcgatcgcggtatgcatggcgctgtcgaccgcggctcagcttccgatgattctgactccgatgaacctgcaccacgccgtaacatttgtaacttgatgggtcattatctgttaggttacccgtcgtctctcggcccggcaagactcatgaacggtaacgccaacgcggcaagcccggaagctgcggccgagatgctggagcgagccaagtacatccctgttcgactcacctacgaagagcgcaagctgctgcgagcactggaggcggcgctgtgtgtcagtagctatacggacaagctggacacgcccaagttcctgccggcggccaagcgcgtacgtgcccaactgcaagatgtctgcggattcctgtcggctctggctgtagcgtcggactacaaggctggacaggaggtcctggacgagaagaacttcgccgagagtgccgagttcttccaggagatcttcgaactcggtagacggtacaagatcatgaacccggagaaaatgcgcggtgagtacggcaagctcatgtacttgctgcaggacgcagtgagcccggaactccaggagttgctgggattctcgtgtctccagaagatccgcacggtgtacgatgtgctggaagctggtggcgctctggatatgctgcgtgatgcccgtattgagactgctacgatggtggtggcgccggagggaaagtcccgtcctcagatccagcgccagatcaagctgaaggagcaggcgattcgcgctttgagcgacaagtacgaaagccgacgcctcacgcgcgactcgctgcagcagtgtctctactcgatcgcagataacaactaccacctgtactttgagcgtgacccgattgatcgcatgattaagctgctgaccacgcacttcaacccggacgacgagaaggaagacagctcactggccatcattagtggaaatgacggcgctcggctctcccattcgcacggccgacagtataactacgtgcttcagtcactgacgctgtggcgtgagattgcccacgacatgttccgcctgtggtgtctgaccgatgaggacctgctggcagacggcacgcgctacgagctgacggacaccggccagggtcttcaccgtattcagcctgcgccacgcgtgtcacgcgcaatgcacgtgatcctgcactctacccagcgcaacctggactcgtgggtgggctcaagtgtcatccatttaggtgacaagaacgtacccaacgcgctcatgttcatcgacaagtacacgcaggtggggcacattctgcgcccgattgtcaaggccatcgacagcatcgagtcgatgtgcgagtcatcgaaggctattcaagggtacgtggagaccaccttcggcggtgctaaaaagctgaagcggacaattctggccgactttttccgcgaagcattcgacggcagtggtgcagataacttcttcgaggccggttcttgcattgatggacgcctcacgagtgcttggaattggtgttccaatctgcacaagaagccgttcttcccgattttcaagatcacgggcttcgttggttttgacggcaagtttggatagatgacaggacacagcaagcaaggctgcgtgttgtattgacgcctatagatcatgataacacgtcacgcgccatgcgcttcaacagcacgagatgaggttgacttgttgatactttctaacgttattcacattataccgttctctccttcaaaaatgtactgcgcagctgcactcggccttctcataaggacatcggacgcgatgagtttgacgaggacgagtccatgctcactaccccactgtaattcactgaggagcggctcgtgatctgctggatcgcatagacaacctcggtagccgacgggcggtcgtccgggttcagcgacagacaagccttcgccagctccagtacagccttcggacagctctcggtgaagtccggaatcagctcaccggcagcgaccatgcgcagaatcgcagtctcctccacctttcctccttgaggcgggttcttggcattccaatacgggtaatcctccgtatcgatctcggagaggacaatgcccagtgagaagatgtcggcacgctcgtcataatccttgccgagcagcacctcaggggcgatccagaaagacgtcccgataccagcagtcatatgagtctccatgtcgtggcgctcacgtgaaacaccgaagtcgctcagcttcgcatccatctccgtgttcagcagaacattcttcgacttgagatcacggtggatcaatttggggtccaacgagtgcaggtacgtcaaggcttctgcgatgtgctgcgtgatacggagcttgtgcgcttcccacgtgagtgaggtgtttcgcaactggaagctgcgcagtacttcgcgcaggtctccacgctccatatactcagtcaccgcactgaggttgcgcagtgtgtcccatgccacaccgatgaactcgacgatacgcgggtgctccagagtcgaaatgaggcaaatctccttcatgaacgcttccacgtgcttcatatcctggcacaagtccgttcgaatgcgcttgatggccacacggcggcggttgtagacaccgctgtacaccagtccaaagccgcccttgttgatgcagttggcaaccttcacgtccttgaacgggattcggtgggcgatgataagcgggtcgttgataatgttagtgttagccgtgaagtgcgagtcgaacgacagggtgtggtcgaagacagattcgtcccgatccttgcggcggttgtgcgcacgacgctgtcggatgaacacgaaaatgagcacgcacaccacgacgcaggccgccacgattacgtagatcaggtagctgttgctgctggacgatgagtccgacgacgtcgaggctgtggtggtgttcagcacacagaagttgatgccatgggcagtcatccacgtgccgtcgtcgcaggtgtacgtgtcgttgggcgggtccatgttgaaattcgtgagcccagagatgctctcgaacaggtcgctcgagaccgtccagttctggatcgcgttgttctccaggtaaagactgttgagctggttcaggtagaacatgcggtacgggatctgcgtcaaggcgttgttgctcacgttgatggacttcaatgggcacgggttggccgtgcacatttgcgacgaaatacgcgagtacgtgccgtgcagcttgttgtgcgacagatccaggtactccaaactagcgaaaccttgcaagaaggtggccgtcacttggctgatgttggtgtagcgcagcgtcctgaaaaatataagaaaaaatgatgaaaaagcgtcagcataatgtacaaaaaaaatcgtaactgcaccacagccgagcgtacagattctcaatagcgagagggatgtagtccgtcgtgtcatccattgccgagtacaagtccacgttctccagcgtactgtaaagcattacaaaagaaaattacaaacagcgtcagtccgtatcctgctcccctctctgtctcctcaccccgcacaacacaactcacattttctcgagcgccgacgtcgtgccgacctcaatgagcgacgggttggacgtgtcgtagtcgtcccagcccgtggcctcggccgtgacattgagcgccacggcgtcctccccaacaccgacaatcttaatggacgtcaggtcgtcgggcgcgacgatcgtcacgagcgacgtgagccccagcgtggcgccgaactcgagcgtgagcggctgcgccgtgagctcctgtcgtggctggatgaagaactcccactccgtggcgttctcgtagccctcgaggcacgtgcagctcacgcccacggccgtgtacacgtcggggcagccgccgttggccgtgagcgtgctggacttggtctgcaccgagggcttgccgtcgcacacgacgggcagcgccttccagttggccgtgaggctgctgccgatggtgctgccccagacgctcttgatgtcgttggggaagagccgcgtctcgccgtcctccatgtagttctgcagccacgccttcacctggtcgtcgatctcctcgccgctgccgctagaggaggaggaggaggccgcgcgcgccacggccgccgccagcgccagcgccgacaccagtcgcagcatattttgggccggttcgagtctcgatctgggtcgaactggactctcaaggaggcagggcgacggtccggttgactttttcctctcctctcctctctggtcgagcgagtattgcaccgaccgatacttccggctgtgggtgtgcgcgacagcaggctgaaacgcgagtggcagcagagagagtctcggtggcggccgataagaagcatcggcgccccggttttttgtgatatctgctggcaactatttttttcctgcgcgaaaagggtactgagcaggaaagtgtgacttatgtcagtggattttggtgtcgttgcgctggcctgctttggcgttcgtacgcatgccgctcagataatgatagccgcctgtacagtcagtgatgttggcgatggtgctactgctgtatcgagcagagactatttaacatagtctcactcgatttagaacggatgctataatttacgcgtcgagtggcgaacaacgattttagagtgttggttagataattctcagaaatagcaagtgatggcaaagtgtgtatggcatacactgtatgcaaatgcacttgttgccgtactcatcgcgtctgccgaggtatttgcaaggtagggcagacaagttcgatagagtcaccacgctgagggttaccaacgtcacacatgcttctgtaacgttaacgccacgtttgctttagtagtttggcagttattgtcgttgcacaatagttgctaaatttgctgcatgtaggtacagcgcgaatcttacttacattttcctccatgccggtacatgtacagcacaagtctacttacatagcaacaacacgtgccagatgtactactactggttcacattttcctgtgcggtgggcttgcgtccggaaagttgccgcgaaacctgtacgcacggtcgccgattcgaggcagatccagtcaagctcaagtgttagctagcggctcagcgagccgcgggcctaacacttcggtgccagctgcaacagcggcggcgccgcgcgttcaaaacagaagcgcaagcccactgtccgcagcggtggcaacacgtagccgacccggtcaacaggccgctgcagtcgcagtcgctacagtcgcggggcaaatcccgtccggcagcttttgtccatttcgctcgccgctttctgaccagcaccgacatgatacttgccctgatttccgtagccgccgctgaacgcccgagaggctcgagagcctcggacagctcgagcggcgcggcagaaatcgagtcgcgcgtggtggcgcatcgacttcaactcggcctcttttgtccgcgatataatacatcaggggtgatccactcgatcatttagtgctcatggcgacatgcgcacgcagcgcaaccaagcggcttcgtcaactcaaggcgtcaagtccttggtggtcttgagccctgtacatgcaggagcatcttgccaccttgaccgccgttgccgccgctgtcgcgcggttgaagcgcgcctcggtctctgcacgagtcgctggacgcccgaggtccaactgcgtgatcggctctatgagcggcgcgagcttgaagccggaaccgactcctgcacctgtggctgaagcggagaccatgtggggccacgccggacctgctggccgctggatcacatgcacatcaaacgactctagctgacaaaggcgctggccattacacagcacttgcgtagtgcacgtatgcaagcttacccaaaagatcgggttcgtttacgggcagcaccgacaagatattcatcatgtacactgtaccgccacttagtgatgggctattctacgctgtccatgctcagggaggacgctcgaaggtccgtcgagttggaagacaactccagccgcaccaagtcctggaaaatccgcaccagctccgtagcgctggggcggtcctcaggtcgcacttgcaggcagcgggtggccacctcgaggatggcagcggggcagctactgctgaacgacggacgcagttggccagtggccacgagctgcaggatctcgccctcttgaagcttgctgcgcggctggttggctgcgtcccagtacgggtagtcgtccgtgtccagctcggacagcacgacaccgaacgagaacacgtcggcccgctcgtcgtagtcctggccgttcagcacctcgggtgcaatccagaacgaagtgcccatgccggcggtcatgtgtgtctcgacgtcgtggtgctcacgcgagatgccaaagtcgctcagcttggcctgcatctcctcattcagtaagacgttcttggatttgaggtcgcggtggatcaccttcggactcaacgagtggaggtacgccagcgcctcgacgatatgcagtgcgatcgtggccttgtggtcgctccaggttaaccgataccctttctcgcggcagttgcgcagcaccgtgctcaagtcaccacgctccatgagctcggtgactgcggacaagtccacgagggcctcccacgccacgccgatgaactccacaatgcgaggatgccgtagcatggccatgagcgtgatctcccggatgaactgttcaatctgcgatgcttcggcgtcccgattcactcggatcttcttgaccgccacccgccgaccacgatatgtcccgacatacaccaacccgaagccaccgcgactaatacaccgaccaagcttcacctcgccatagtcgattctgttcgtgacgatgatcgggtctgctgcgagacgcacgcgcatcgtttcgtgggcctcgaagtcggggttgaaaatcgagtacaagtgctcatcgcccgatgcatgcgagtgaagctccgacgaccgttccttcctgtacgtgagccattgcaagaccagcacacacgccagcagcaccacaaccacgatgccagcgaatagcacaaagatgagcgggctcgtgccactcgatgagtttcctgtggcaaatagttgaatggttaggagagttgtgcatgcaggaatgaaggcgcgcccataccaacctgtagtgctgtcggtaacacaaaatcttgcgccgtgcgtagatttccattggcccgtcgagcacaccgcggagtcgctgggtaggtccgccttgaagtcctccaagtcttcaatttgtccaaatgttgtcgagttcacgtcgaagctgcttatattgttcccctggatgtagctgtataaacgaagttgggcacaacggtacacaatcgtcagtcacctaattcggaaggacagcatagcaccaggtcatgcatacaatttccgcagtgttttcacgttcaatggcgtcgttgggaacacggtgagctggttgtacgaaaggttactgcagattcgtggtcagtctcgacattagtgtacgaaataaaaccatgcatgacgcactattcctccaattcgcaaaacgtcaagaagcaccgactcgccaaaacctggtttcctgttcccgcgtaggctgcgaccatgttgttggaagataaatccctgcattcaaatgcaccatcgtcagctgagtgtgcctatatagatttttcgaaatggagaggtcgaagcttacaaatgtgttaggttgttcattcccgcggggaattcgaagccaaatgatgtgatgttacagttccgcatagtcctatcttacagacgcaacacagtacaggttaagataaccaaacgcagttcactgaattccctttcgccacttacacactggttgcagttggcggcatgaagctggatacaatcgtgacggtctcgaacatgtcgatatttatcagttcgctggagaataaaacaactctaatcagtgccacagtaacacaaacatcaccttcgtaacttagcgtacatggttgcaagcttcgacgttgagttgagcgtacgagcgatgggaaactcgagacttgcttggtttcgatactctggtacgaatgcgatcgagagtggcgcttcgccgatgcctataatacttctgcaagcgccaaacgtgtcaacacgttagatcaatcaatattcacatcagtaaaccctgacgctggtatcgtcttacaacttctgcagcgtgtccggcacgtaaagcgtttgaatagcgtcgatctctagcgtgcccgtcgctgcctgcgtagtcgggaatgaagtcgtggtattcccgcttcctttcgttcgtattcgaaactcccaggcaccgtcactagagtcgaatccgctcaaacaggtgcaggacccgttcacgtccgtaaggatagtggggcatgcgccattgggctttacagttgacgagcgtgttacaagtgatggcagcccgtcgcacacctgcaggctggagttgagcgctttattcgagccgccgaagagttgcgtctcgccgtcgaggaagttgtcgacgaaccagctttgcgcgctctcgacatcctcgtccgacagctccgattccgacgcagcagtgctcatgagagcaggagtgtggactgtgaggcagtataaatagtggggctttcgtggagtcagcactttcgtgccagtcgtcgaaaaccgcaagtcctgaatgggtcagcggttgctggtgctctgaccaagagagcgaatacagaaaaatacgaccccccggcctggcgccacgacggcgaatgcgtaacatcgacgtccagctgggcagtgcagctgtgctggacacggatcagtcgagatgctcaatgctctctagagagtctctactccgggcgcagtatttcgcagctgcaggtgcagcatccggctacgtgcataactcaactcggtgcgaagctcacgaagcataggatactctcgcttagcagaaatttctgcgaggaatgcatgacatgtacgctacaacgctgggtctgtgcgtacaagtagcgttgcatgctaccggtgtgacgtccgttgtggccatggacatacccgtagctgaaacgcgcataagacgtaaggcggaatgagtcgtgagtaacaagcaagttcccgtcgacagacgatcgcgtaccgtagacgcgttccgacgtcgccttgctgctctcttccggcaatcccaaacaaaactttcttttgacaactaccccaaggcaaggatgatagggtcgctgcttgagatccgtctctggggccgtgaagcacagcgaacttcacctcgagctgtcgatgactccgcaatgaacacgtacatgttgttactccgggagaagcacccggtcctaatgcattttttactcgatacgcagcaatgttcacttcaatcatggaccgaaggtgatgacactgttgccaacattcatgcgactgcatcgttcgtgccgagcacgcctacgtaaggcttagatagacctcttcggttggcaatcaacgcgagaatcccgaacaacaggccaagtctatgctgtgcagactggcaaccactttacaaaccttttcttgaagacagaacgtaatgatatccattgattgacaaaacttcacctttgaagcaaaacaaaatatccctacagctccttgagatcctcgtacacgacccacctctctcctcggcgatcgatgtcgacggctgcggtgtcgtgcttctcttctccactcgaagagctcaactgtcgctgctggtttaaattatccatcgccgcctggtggttggcgcgaaggctggcgggcgacgtggggcccgcgtacggaagtccggcgtggctttggctcgacggaacgctctcgctgccgaagctccgaccgctgctgtctccacccgagctgcccgccgcaatgaagttcccgccggtcgtaccgctggtagttccctgttcggcgcgccgcgttgtggttgtagtcgtggtggtcgtggttcgcttgccctttgcaggcagcttggttcgcaccacttggtgagtcacttgtggtgaagacacgaccacttcgtgtgccggcgcaagagcttcagctgctgtcgggcgggacccagaagcaccagaggcaaccgacgttgtagttgtggtagttgttgtggtcttcttggtgcgtcgtccagcggcgtaggctgcggcggccgacgatggcattgccatagcctgactctgttgtgcttggccggaggaacgcaagttcacgatggtgttggctggtgctgtgcgagacggcgagctgttgttggtgctgcgggtgttgaagtcgaacaagctgccaggtcgcaccatggaggagaaggacgcgctcgagttgcggtcttgcaccaactgctgcaggtacaccacgatctccgaggcgctcggacgctcttccgggtcggcgcgcaggcaacgagcagcaagttcaaggatggcgggcgggcagtcgtccgagaaggccggacgcttggcgccacgagccacgaggcggaggatctcgttctcctgcaccttgccctgcggcgggtgctgcgcgttccagtacgggtagtcgtctgtgtcgatctcggagagcacaacgccgaacgagtagatgtcggcgcgctcgtcgtagtcccgacccagcagcacctccggggcgatccagaacgacgtgccgatgcccaccgtcatgtgctcgctgccgtcgtagaagctgcgttcccgagcgatgccgaagtcgctgagcttggcctccatgtcggcgttcagcagcacgttcttggcctttaagtcgcggtggatcaccgtcggactaagcccatggagatacgtcaaagcttcggcaatgtgcagcgcgatgacagtcttgtgggcctcccatgtgagacggtagccacggcgcttgaatcgtctagtgacatcgcgcagatcaccgcgctccatcaactccgtgacggccgacagctcggcgggcgtcgtccagcacgcgccgatgaactcgacgatgcgcgggtggttcagcccggaaatgagcgagatctcacgcacgaactgctcgacttgttcacgctcgacgtcgcgttcgttgcggatcttcttcaccgcaacctgtcgtccccgatagctgccaacaaacacgagtccaaacccaccgcggctgatgcagcgacccagcgtcacttcattgtagtcaaggcgacacgcagccaagatcggattgctcgccaaactcacgccgagcgccgtgtcctcgctgtcaacgctgttgccgtgtgaacgtccgtacccggggtacgcgttagcgccaacagctttcgctccagagccaccagctttagcaccagccacagcaggggccacagcagcggcgtcgcggttcagggcatcaccgaaagcggcgtccgcgttgtacttgggggtagtgggctcaacggcctcgggcgacacgatggggctgctgccccgttcgtggttgtgacgacgacgctgccagatcaccagcagaagcaggaagaagacgatgatagcccccgcgatgagccagtaacccaacagaccgagtccaccatggtcgtcatcgctgtttgatccagcggattgagccgagtcgggcgctgcagccgtggacgcgccaagcacgcagaaggttgtgccgtgagccgactgccaggcaccgccttcgcaggtcgaagcagagcttggctggtctgttgtgaaggccgagagcccctggatctgcttgaactggtcttggctcacgttaaagtccgcgatatcgttgccctggatgtacagcgcctccaagccgctcgagttcagagtcgccgcagggaacaccgcgagcgcgttgtgcgacatattgagctccttgagcgcagcaccgcccacatactccgtgttgatgctgttcgaggacaagtcgaggtactggatccagctccactcgcgcgtgaagctgctaccgagcttcgatatgttgcagtttctcagcgtcaggttcgtcacggtggcgggcacgaagtccgagttctgctttgccaccgagttaaggtcgatgttgtaaatcgacagcgtcgagatgttggtggagtttctcgtcgaccgcacaagcgtcagcgaagagctcgaggccacgcggttctcgtcgatgaacgtgatcgcagccggagattctccagctccttcaatttccagcgtctcgaggctggaggacacccagatgggtcggatggtgttgatagccaactcatccgacgacgtctgcgtcgttgcacgggtagtcgtggttgtggtcgagttccacgactcggtcgtgacgtggaaaacccacgagctgtcggtctcctcgtagcccgtgatgcaagtgcaagacgcgttgagagcagtcagttcctccgggcagccaccgttcggcgtctccgaatccgaacgagtgaccagggccggaagaccattgcacacctgtgtcgtcgttgttgaactcatggatccgacgacgagctgggtctcgtcgttgcggaaattggtgcggaaccaactcgccagcgaagatgaagacgaggagctcgacgaactggaggacacactggagctggagccatccgtagaaccagtcgcggagtttgctgcggagccctcatacgatgacgcctcagagacggtggttgtttccgtagtgctgctgctagctttgctgccgttggaattaattgtggttgccgcagtgttctgggatccggttgacgaggtggttgtcgttgtcgtggtggagctctcaattgccccatttgtcgatccagttgatgagctggttgttgtcgctgtcgtgctggtcgttgctgaattggcaccggttgtcgatccagtcgatgaacttgttgtagtcgacgtgctagtagcagtgttggcattggtaccagttgtggtggtctcacccgtggaggagctggtacttgtggtcacgcttgtgctagtcgaactggttccggcggtgacggaattcgcattgttgttcgtggatccggttgttgtggtgctcgttgcagtttccccgttgaccgtcgtcccgctcgtgctgaccgagtttccccctgttgccgtactggaagtagcgccagtgctgctgccagtgttcgtgctggtagtcgtcgacgtagaagcttcttccatcgtagctcctgtcgacgacgacgtcgtaactgtgcttgacgatgttgaggctcctccagtactcgtcggttcttgagtaccagtcgtgctagtccccgatgctgtagccgaagtcgaagatcctcccgacgtcgttgtccaagtcctggagctgctggcagacccgttcgtgtccgagtcggtcttcgtcgtggtcgtcacggtcgtgatcccggttgttgcatccttcgtcgtggaggtggtcgtcgtgttcacatcgttgtccgtagttacagttgtcacgggtgaagatccatctccattttcggtcgttgtgacagtcgtagttgatacgctgtcagtatttccttccgtggcaacattgctggagctggttacgccgctggaagttgccgtgttcgacgctgtgttgctggtactagcactcgatgtactcgtgctcacagtcgtggtggtagtggtgactgtcgtaaccacttcaccggaagacttggtttccttcttggtggtcactgacgtggatttcgacgacggcgccgcggttgccaccgagttggtggaagctgatgcagatgtagatgttggtgtaccctccgtagccgacgtgagcgaggacgcagcggcagtcgacgagttcaagctcgccgagctcccgctcacggtggaggtaagttgttgtaagccccgcagcgacaccatcgcaatggcttgtggtgcgagaaggactcgggcggggggactacgccgttagacgtgaaatgcagttgtgatgcttccgccacgctacatcccggacagccccgcccgagctgcagctgcgtctgtcaaggcagaagaaaatcccgacagctttcgcctctgtggcggggcgaacgtgtgccctgccgtgagcactataggggcggtgcattttcgtggcgaaggcgtcccgagcctgtagtaacgacaattactgcaacacaccgctgtactcttgactccatgagtgccatgctcgacttggggcacttgagcgtttcgtcggcactctcggggccacaggcggcgccgttgagttcagcttctggaccggcttccggtccgtgtccggcgtcaagtgtcgctgcaagttgacgtcaaagtaacaccgcaatggtcccagtgtattttcgagcgtttgggacgggctcatcttggtggagcaaacctaatgggacgcttgatcctggacaccgcgtggcgtgctgtccaccagctcaagtgatatatcgcactcaattagtaaccgtgttagcttgctctcggtggccgggcatagtccgacgccaggatggtttattttgtgcatgagtggtgaattattggggattttgggtcgtggcggtgcggaaccacaaggcagcggagttgaggcgaagtaccacgagctaatcggcactaacgccctcgaattgatgttacttaatgaggcaaggcacaaattgaagcggcagacacgcacaagcacgcagaccgccgggttttcgtccttcagcagtgtggggtcctcggtggaaaaagttagtcgtagagagattggaaaaggcccgagccacacagacgccgacctgaatgagcagcaaggcacgcgagggacagccatcgaaagcaactgaaaccgagggcgacgttagaagcctgcacgagtaggaaacgcttcgcctcgatggagacagggccaaacacccattgtgtacatggttgctgctggacaagctgtgaagttacagcggcgcaactgtgagccaaagttggtgagatggctacatggccatcgagtcactcgtgtgaggcaaaaccatcacaaaacgctatgcttgccaccaatttacaggaaacagcaccgacaaggatacgatagtcgccttcaactaacgctgatcgaatcgctaacccaaacaccaaatttatagtcctcacaaaatgtcactaattcatcacaaaatgtcactaaaaccaggttcagttcgaaaataatgacatccaattgctcaaaagcacaaaacacaaaaattgcccgacatgcaggcgcccgggctggaggagcgcaagaaggcgctggagaagaagttcgtggagaagcggccgccgctggcctacgccaagctcagcgggcgcgtggagggcgacacgcccttcgagaagctcatcacgcacctgccggcggagctcgggcgcgggcccatctcgtcgctgcccgaccaccgcatcgcgctgggcgagcagaaggccatctcgcgcctgcacgcgcgcatccagtggaaccagacggacagctgcttcgagttgcaatgcctcggcaagaacggcatgttcgcggacggcaaatttgtgaccaagaaccagacgatcaagctcacgtccaaaatgccgctcaaaattggtcacgccagggtctatttcctctacgccattcgctctaccatcagcactatgagtggattcaagatcatccaaaaggtaaagagagagagggggttaagtggtgttaaagtttagagaggtgatgggctgctgtggctaaactattttttgttgctgttttttttgccaggcttttgacaaggccaagtatcacaagggactcacgagtatgacggcggaccaagtgtgcgaccagattctggagagttacaccaagagcgagcacgaactcggtggaaaagaacacctgcgtactttcgtcacgtacgtggtgaacattttgtttcatgttgttgttgttgttgttgttgttgttgttgttgttgttgcattaccgaggcttatttgcgattttgtgtgagcagagcgtatttgcaggaagacactggagcatttgagcgtgtggaaggaacgggagcggcagctcctgtgtataaaatgaagccggtggccacggccagcgacgcaaagaagactgtatcggtcaactcagctccgaagcttgaggagactggtgaggcagcactgaagaagcagaagattgctgcttaaagctgcaacacgagtcttgtgattgttgaaaaaaaaaaaactgcggcaacacgttaagcattttcttaaagctaatttggtggtgtctgcggcgagtattctatagtattcatagtgcggcgagtactccgtccgtatcgcgctttgtccaagataaagcaatccagtcacccctatgtggtcgacaagaagcccgccgtggcaatatcaggctccggctcggactgcggccggttgttgtcgaactgcagctcgcgcatgagctctttgatggtaaggacaacctccgctgcactgggtcggttttcaggtctaccttcgagacaactcgcagccaatgcgagaactccaggcggacaatcgttgtagaatgttggtcgcaatgagcccagcgccaccttctccaatatcttctgctcttgcgagcgccgttcgtcgtggtcgtcttgtgctggaatgcttccagagttccagtacgggtagtcatccgtgtcgatctcggacagcacgacgccaaaggaaaatacatcagcgtgctcatcgtagtcacgcccgagtagaacctccggggcaatccagaacgacgtgcccacacctggggtcatgaatctgccgggacctccattgacgtctgccacgagacgcttacgcgagacgccaaagtcactcagtttcgcctcgtagtcgttgttgagcaacacgttcttggatttgaggtcgcggtggatcaccttggggtttagcgagtgcatatacgcgagtccttcggcgatatgcaacgcaatagtaagtttcttgccattccacgtcagtccttgatgatccacgttgcttccctggtgtttcaaagtgtggagaacatcgcgcaaatccccgcgctccatgtactcagtcacagcgctcaaattgcgcagcgagtcccaggcaacaccgatgaactccacgatgcgttcatgcttgagcgaccccatgagcgtgatctctcggatgaacatgcgaatctgcgagagcttctcgcacttctcgcgcatgatcttcttgatagccacacggcggtgcttgtacataccggtgtagaccagtccaaagccacctttgctgatgcagcggccgatgtgcaggtccttgtatttcagccggaacgacatgatcagcggatcattgagtaagtccgcgttcaatgtggggtgaagagagttgtagaactcctgcgtcgcagtgatatccgccgctcgagacgtctgaacatcctcagcacctggggtagtcaatcctttcttgcgtctgcgttcttgctggtgttgcacgaatttggtggccaggaagaacagcagaaagcccatgaggcagcctccgaagaccgctatcagcatgaagacagtccagttggtgttatcaatcacgctgccttcattagccatcgcctctggggcagtcgtgctcgtagtgttcacaacgcagaagttcgtgttgtgcacctgttgccattcaccaccatcgcatccactcccatttcccgcgggggaatcaatttgaaacaccgaaagctgcgaaatagctgcaagttcgtcgctggtgactgtcaagttcgtgatgtcgttcccactcaggtcgctgtggcacaacgatgttagttcatgtcatacatcatcaagcggaaaacaattgtggacttaaacttacagccttcgaagattgggaaactggagcagttgcgtcgggaactcggtaaagctgttattcgccaaaatgctagccaaatcacatttcggttagtaattttaagaaaacaattcgactatccaagaactcacatgtcagtcattgcgttcaaggtctcggccgatcctggcaagctggtataaatactggatagctggtttgcggccaaattcctgtgatgcagaaaaacaaaaacaaaaacaaagtcagatataaaagcattggtgaaacttgcccatggatggcacacgtacagagactcgagggaggtgaagctttccaggaaggactggctgaggctgctgatattgcagcggcgcatcaatctgcaacatccaacattagttttcgaggcggtgacaggtttcacaaaggcatacgcactcacgtacaggcttgacagtgtcgatggcacaaaaccgtctccaataggtacttcagagagatctaagttgaatatgtcgctgcaatcacacaaggcagaaagtttagatacaaataataaaagcggatcagagggaatcagacaaaacttacacttttgtgagagctgagacctcttgtgaacgaacgatcgccactacatcgtctcctgtcgtcgatttctctaacctgacggggacaccgttgctgccctccccctgtattttgctgtaccaaaacgcagcaacaaaatcagcatcttcatctccacacacccgaaatttccacgaaaagaaaacgaacaagacgtacaagataagtagatctgcaggaacgtcgagcatcatcagcgagttcacttgaaggacggccccttgcttaattgtcgtggggaatggagacgttggctccgtgtcgggctcgccgatgcggaagctccacgcttttgtgttggcatagcccgagagacacgagcacgagaggttatacctgctctgcgctgccacgcacgccccgtttgtcgggacagttgcagacttgagtattgccatgggctcgccgtcgcagacgctttcggtgagcagggagtcggtcatgatggtcaaccgctgctcgtcctccgccattgtagacgcgtatccgcgcgccaaatacgcagcagtgtcgtcctcaatgctgctgctgttactcgaggaagagtccgcgctagtccgaaggaatccggggccgctctcgctgctctgagctgctaccggcccggcgcaaaccactgtcaccccggccaggaatccaagtgcgccgcggtggcgtgagttcatgatgtaccgacgaagcggttgggaaagtgagatggagatatatagactaccgctaggcggaaagtgtggaagactggcaccgatagccccgcgcgcactctatagagtaggaggcccgatgacgacttgaagggcctaacctcgaccagagcagtggcggtggcggatcctctcgcttcgtctccactgaaatttggtctgtgcggctttgtgtccgcggaggtgctcgcacgcgcccgcaaacccggatgtacttgtagtttacgttccgtcgcggccacaagccagtggcaccggcaccgaagccaaacgtggccagcgttagtgctcaaagttcggcgcgtctccaccaagtcgtaggggcacaagctggtcaagtccgccgaacttctccgctgcgttcgactcaactcagcctaccaccaaaggggaaagggccagcacgcctacagccatcgagcctttcgttcctacaggcgaccaccgtggtccggagagagaccgagcggagaccgaaggaggccagcgcggtatcttgtcagcgaactgggcgtatgcagtaagttagtagtgcacttttgcatggctccattgcaaacacaccgagatatcattaggcgtatgcatcccgtgcgctttgggcctgatcgttagcaacgtgtcgtatgcgcgtttgacgagctggcgatcgtctcatgaacagcttgttccgcccccttagataccggcagattgctcactacctcaccactttcgtgtaatttacgagacgtccgtgttgcttcgtcgccgttgagtacggaagtcactccgatgtcagcctactacggccagaaaaagcttattcgtccaggaggaggagcaacacggtcgacgcgtgatagaacggagctcggagccttgctgatcgattatcctgccacaaactccatttagcacttgccacgcactacaataatatccacgtgcgtcacattggatatgctttaaccaatcgtcgatgcaacggtcataccaccctccactgtataggaagtgggacgtatagcaaagtcccagtggatcttgggacgtcctcgagtcaagggccttgacccgtcaaacgtccacttccattccaagcacgagagcagcaaagtttaccgggaatgacactgcaagtttcctctaagcttcccagtaggtaagctttgccatcgggcaacattcgagaaacatgcacgtcattaatgtggattaatatcaactatgagattccctgtcaaaaatcagacagaaattccacttgctgctcgtcacacttgttgaatttcttgagctgggcgacaatggacgtggagatgcagcaagcgctagagcgagctctgagcgacggtgatgtcgacgccttcaagcgcgtgtacgagcagaacccgcagtaccgcgtacgtgtgtgcctcactccccgttcacccccatgaagttccgggatgtctaaattaatatacatccgctactaggacgaggagagccgaacgctgctgcacctggcaatcgagcacaatttattcgatgccgtcgaaggcgacatctcaacggccattgtggacgcacgtgtaaggcaaccacattggatttctacgtcatcgagacatttgattgacaagttaatgcgtatcaaccaatatgggctactacaggacaagggaggacgaacgccgttgatggcagcagcggaaaggggtgacagcctcatttgcgaggaattgctggccaacggggcgtcgacttctgccatggtggggttatacagagggtcttttaattttatagcggaattttggtgaccgtggatgagttttttttttcttcttgcaggcgtcggatggaagcacagcgctggcgatcgcactgcgcaacgaccggttgctggtgtgccaagtgttggtggcagcggacgcggagcaggcggtgcatgtaagtggcgtggaagtagggaacaagacaaaaggctcggggctaatgtttctatgatgcagcgactattactggcgatcagcacagacaaacgagatgaagtggtgctgctggtcaaagcaggcgtgtcattggatattacggtacggcatggagggaaggtgctgtatccatcgatgcaagttgcttactcgttctgccattgttgtatcgagcaaaagatggctgggggcgaagaacgaaacccgctgagggaagccatttcacatccgctgattcttcgagaactcctgcggtttggtgctccagtgaacgccaaggttggtggagctgtaaaaggagaatacctgcacgcttctaaactgacgggttggttgtattaaatgattttgttttgtcagaacaaggctggggtaacagcactctcctttgccgctgcggctggaaatctcaaggcttgtgagattcttttggatcatggggccccccttaactccaaggtgcgagttgcggtcgctaactttgctatcaagacgcgcgcttgcttacgtaggatgattctgacgccaacaggacaacgaaggcagaaccccaatgtaccatgcttgttgcctcgaaagagagaatacaattgcgtactttgtgcagcaatatggtgccacagtcgacacaatggtaatgctgtctgttcatactgctaacagactgaaaacctaatccaacgtttgatgcgatagaacaacaaagggcgaactccgctcttttaccatgcagagcgaggaaacgtgctcgggtgcgaacttctacttcggtatcatgccaacgcaaatcacaaagtgagtaaagctggtggattttaatcataacgatctctctaacatctattaaatcatgtaggacatgtccgcgtggactgctcttcatttggcggctagccatggacacaaggaggtgtgccgcctcctcttgggctacgtaaactcaacagacatagagctagaggaccagcaaatggtgctgtgccagcctacatcgtcaatcggaagctggatatcggtcacggagacgtgccttatgcggatctacgctagactgatgtaatgattcatgacttgtgagttttgacacatactacttcatactaatcaactgtcttgccgttgcctaggtcatcgggtgtgcaggcgacgttgcagaagtacgggacgctaaggatacgagactacagcatgaatacgttgctccacgtcgcagcctcaagtgcgggagacaaacactgctactacatcattcggtgccttcatttggtcggaaatattgcgatcaacactcaggtatccctgtggcttcgagtttcctgggatatacgtaagcattaatgtgttgttcttgtttcttttgttatgaaagaactgctactgtgaaactccgctggacgtcgctgcggatcggcagtgcaccatggcgtcttcagcgcttcagtcacttggtgcagttcagatatcgagcgacagtgagattttccccagcgtgatccaattggcagcgcctcgaaaaggaccgctgttccacactgtgatgggttcgtccaaggatttcacttcttgctcgcgcgaccatatcgtgcagttgtgcagaggtatacaggacggcatctacgccttcacggacgacacagtggctcaagttgacaccgatcgcggcgacaccgtcttgcactatttcctccaaagtttcgtcctgcgcagttccttcccttcagtggaagagcaacgacaagtgctcagctcgcccaagtggcttggaacgttagaagcccctcgctttctacgtgtattaatcagcaaaccggtaagtttgaacaagcggaagggcatgataatattttgtttactaacttgctatgtcatcatcgtgcagaactgggaaggcaaaacgccactgcatgttgcagccgaggtgggagctttggggttttgcgaggttctgatcgaaatgggagcgtcggcaaaggaagagtgccaagcgccagacaaccgtctactcgaccagccaacagaaaatcctcaattctggaagcctatcaactttgccgctacagtcaaagcctcgctggacgaggctcacatgtctttcgaggagcgcagtgcattggtcgagtacctgctcaaggagccagagtcactgccggatgaagagaatgcagcccacgactgcaaggagaagatccaaatgcactttccactgctactgccgttgtttattcgcgttgaggacgagaccaagcacaaggaggactatgcggaggctgaagagctgtactataaggtacgcaagcgcacttctcactctccataactctggtatatgttctcactccgaccgcttttgtgcagttcttggatgagtgctatcctcggtttcaagagtccacggtctatgaaaatgatccgagtggcgtcacagtgcacaatgtgtatctcgatacaatccgatacggcgtcaagacgctcaagaaggttatcgcgcctcaatgcgtcattgagtccactggggatacactacttcacctgatcgcagctcatgggcatccagattttgctgcaatgatcaaatatctcgtggatacggcacaactcgacatcaacaaaacggtaagtgcatgtatcacgcacgttattactacagttctctagtattttccgcaagccctaacacactttctttgatgctctacagaacaagcagctgaagacggcgttgcatgttgcggttgagcacaacatgcccgacatttgcctgttcctaatctctcaaggcgccgatgtgaccgcttcatgccaaaacctcgagactccgtcgaaagagacatggctcacaccgctgtacactgcgctgtggtcatccactccaaagtacgagatcatcgagatcttgctgagtacgccccagtccattgccaagccgcggaacccgaagcttagtcgctcagtgcgatacgagcctggccaaggcccagataccaagtggaacggcgttgtgctcgaacaacttttgaatgtccacgcatcggctttaccgcttttcctggaccattacgcggtggaggtgaaccgcatcaacggagagaaagtgtaccgattcgtcgaggtaagcaacgtttagagaattatcttccctgccgtggctaacggagatacgctgttgtaggttttcgagatttgtgaccatttggagcagatcgtgaacctgacgggcacgttgacgcccagtctttcgtccaagaagacgatcaagaactcggccgtgactcacccagtggttcggaacgctatccatctcaagtgggagctgttcggggcgaatgcgcaccgcaaacagctctcgctctacgtgctgatggtcacgttcttctacctgtccaacctgctgctgccgaagatggaggtcgcgatcgacgaggacggcaagaagcgggagatgatgcacaagtggatcgagttcgactcggtcgttgactacttcgtgggcatcaccaaggtctgctgctggtcgctggccgtgtaccatcttctgtacgtcgagttcttcaaggagtggcgctccaaccccaagcagtactggcgatccgtgtggaacttgctggatgtgttcacgtacctgctgatgctggcgaccatcccgttcgaagtgtacgaaggacacgacacacagcgcgagtgtatgctgagtctgctaagcatcctgctctgcgtgaacctcatgcaggcactgctagtgtcgtcgtacttcagcgtgctcatcttcacgttcgcgcggatgttcaaagtagtcgcgcgcttcctgttccagtacctgctgctgctcttgggcttttccgggggtctcttcctgctctaccacggggcggggccctacacggacttcttcagcgccatgcggatcgtgttcctcaccaccttcggcgagctcaactacggcgacaactacagcttcgacgacagtctccgcgcgcgcaactacctgtcgttcctgctgctgaccgcgtacgtgatcgtggtgatcgtcgtggccatgaacctgctgatcgcgctcatgacgtccgagtacgagaaggtccggacgcaggccaaggagctgtcgctgctggagctcgcgggcgcgctgcaccgctacgagcagtgggtcggctacggcgtcgtgcgcaagctctactcgacgcccaagggccaggagctcatcgacgcctgcgtgctgcacgtgtccgggtcgggtcagcagccacgcgcgggtcgcaacttccttcgccgcgacttgacgtcgtccgcgtcgtccctctcgttctcaggaccaatgaacaagcagcgtagtaaggttgacgctatgaagctctcgctgatcagcaagaccgatggggtggacgaagcggagatggccagcatcacggaggccatcacgacgcaggtcatgaagcatgtgcacgaggaggtggaggcgctgcgcatgcaggtgacgacggagctgcaggacgtccgcgagctgctggagacgacgcagcagagcagcgctcgggagcggaaggatgtggcaagtaggctggatgaggtgttgaagttgctagtagcaggactgcaatcaggatagtggtgtcccggtaaccaagtgtttgatatttgctacttttttaaggggaatttgcaattcagtcaggtttttgggtgggtatttgctattcggtcaggcgtttgctaatcagtcaggacttgtgaaagttagaattaggagagctcttcgagtcgttccgcgccaaagacctgtattggaggctgccatggaggctgtgcaacaaaatcagcagcagcagggtgagacacagagacggatgagcgcacgcaaacgcgtagcagtgttgtggtggtcaggggctctgatgtggcccatcgctaggtaagctgagaaacgcgaaggctttcaaggatctaatgatctgtacgacgacatgatcaagccggacagccacttcatttctacaacccaaaaggaatgggtaccatgacggtccgtccgcgtgatcaacagggaaagctacaggtgaatgagtgtgtcaatatgtatttgtattataatatagcgtaaagaaacaagagagtgaaagatgatacaattccatccgttgttgctgcttaagttgttgtcttctttcgcaagtccgaatgttgtgacccctctccttacaacgtgaacagacaatcggcgaatcttcgggtacaacttctccacgactgcgtacgcgttttggcttttttgggcgtccagccttgcgatatgattgagggccttctgtcgtatcgtcccccaatgccgactcgatatcgattgggttcatcaacctcgcaaagacggattgcagacatccatatcggtaatacggcgttttaggtagtcgactgcggctgcgctgatggcctcgatatcctaaagtgcaaacaccaagaaggcaatttgccttaatatgtattttttaaaatagtgcatgtattaaaatacatgcacagttcatgtattttaaggctccattgttacaaactataatactgggtacagtgcatgatgcactgtacccagtattataaatctgcggctccattgttacaaactataatactgggtacaagtgcatgatgcactgtactataatactgggtacaagtgcatgatgcactgtacccagtattataaatctgcggctccattgtttcaaactataatactgggtacaagtgcatgatgcactgtactataatactgggtacaagtgcatgatgcactgtacccagtattataaatctgcggctccattgtttcaaactataatactgggtacaagtgcatgatgcactgtactataatactgggtacaagtgcatgatgcactgtacccagtattatagtttgtaacaatggagccgcagatttcgtacagtaggatattgaagctgccagaagtacgtcagttctctctgcccgccgcggcggcaattgaattctctcatggcgcaaatggtcagggtgtggttcgagctcgttgatcgccaaggtggccaggtggccacgctaagatatgtggatctagcgccagataccccgcttgccgtgttcaagaatgctgcccgcggtgctgccgaagctgtactccccacagagctcgacacacccgaccttaaagtgtttgccaacgcgaaggcgcggcaagaccagacgcttttggaggagctgaatgggtttgggcagaattatgcagagccgcttatcgtggaggtgcctgaggtttggttcaagctgacggacgcccgcactggcgatcttttcccaggcacacgccttagctcggcccctatcccggagactgccaccgtcgagcgtctactagttgctctgaagaagaggttcaatgacaattacctcgatggggttgatgtcttcaatctccacgcgtacgaccacgagaggaacccgttggaggagacagcgcagcttggtctgttcggtctcacaaggagcaccgcgatcatcgtagaagtcccagcgcgcacaagattccgagaggagacagagcgagaacttgacgaggtcgcgaggaaacggcgcaagagtgatcctgttacgaagtggaaatggaaagaggaggaggatccagtctacagtcttgatgaaggcacattgtatttcgtaaaccgtgatcgcgccacccgagagctggtacgccttcacaaaagcaattacaaccgtgcaaagcgcggttacggcgacgtgtggatgattcctttgctggacaacatatctgggatcggaaagtcgcagttcggccgggaatacattcggagttgccgacggcaatgggatggtttaccagcatcggatacagatggagactttctgaacattatacgtcagagccacaccattgtagtcaatttttctccggagcatatactgcgtgaagacatgagctttaacgtggagaaggctcgcgggagattcgttacatccattcacgcattcttcgtggaaaactatggcactacaccccttgctctcgattcgattgaagcatacccagatcacgtggatattttgacgaaattagcgatcgaagctggtccgttgttcgtcgtgattgatgatattgctttggcttttgatgcccccacccttgatgttcacgccaggaaaagtcgattcatggaattctgccgcacggtcctgcggccattggtttcagtgaaacatttatttttcctggttgcaggtcgcataacctttctgaaccacgctaaatcggaaccagctaccgggtttgttgtttggaggctgagcctaagtttgcttcgatcacctgagattcaagagatcattaagaaaacctattgggacaagaaacaggtgaagactatccaggagcagtttaaacttgatggaagccagatttctcatcatcttgccaaagcaacgtttggtcgtccagggttgctgattgatgccttcacaaaatgccaaacctaccaagaactggctggatatgagacgactggcgaaccggacgcagatttcaactggcagcacctaggcgaatgcgtgctgcgttacaaggtgccgcttcgcgaaatgatggagtgtgcagtggataacacaagaaagtcggtgaacttgtcgaagcagtggagagatcagcgaggcgaaatatcgtacatcgacatcgccgacatgtttggtattgcctgggatgaagactttaaaagtgccaagttgtttatgccaccatatatccaacacgcgattacgatctctgcctactcgttatgaaagctgctactggatgttgcacctgcaatcggccaaatatccatcgactatgctgacatgtttgagctgatttgcatgagacgctttcaagagctttttcgcgagcgaaaatgtccgagtgaagccctggctgatttttttacgaacgaacagtggttcgggcgctgcaaagatgttgagttcgctctatcgactttttggatgcctaaaataacggggaaaggaaataaatctccttccctcgctacaattacggcggacaagacaacgttgaacgttttgatggaggacatcaatgacattgcggtagaagaagaccagttcagtctgaagccgcgttggcaatcttcctcgcctgacatcttactgatgacgacgacaccgcaagcgctattgacggtgggccttgctgttaaaaactatgtcgggaccgaggtcaccgagaagacagtgaaggaggagtgggacaagtttaacctgatgtgcatcaacttgcccaaggacaagtcctcaaagcgcttaaacgtcctgatcgtctgtgcgacagcatacggctaccatttacggctcaagttcgctggcccgcattcgaagtcggttgtttatgccagtagcgcctcgtcgggtgatgacatcatcaacgaaatcattttactgaatctatctacgccagacctccgtgccgagttttttggacttcaagatgacagcgatctcaaagcggtgttggagagcatgattgctaaggttcaggagcgctttatcacgactagggcccaataaagcacatgtcttgtccagcaatcgattgtatgtcataacaccaagtatcaagaaaaaatctcatggtattttttccaagttgtttttttcactgcctttttcgcactggagcggctcatacagtacacgtagctacgaattttggctagatcacagccggatgaattgccccccccccccccccccccccccccatgacttcttcactacgttctagaagataacgcccccaaaaatcaatctagagcgttgacacaagttttgatttttcctgttttttttcaacacagaatgtgcaggtggccaagaccccccccatggcctatgacattgcttcccggcaaccacggctcctccatcgacgactgcgcctccggctacgactaccgccgagcacgacgagccctccttcgactactcgtcctccgacaacgatgaaccctccgagtacgactcgctctgctaccaccacaagccctccgagcacgacgcgtcctcccacgaccacgaatccgctctttaattctctttgggagcgtgttttcatgcggtcattgcttattgctgcattcattacttggtgggcgacctattaatcgtgcacacttgatttaaccccttgggtaccacgttaacagctttagtgtccactgcatttcgtggtgagatgccacaaatacagagctggagataaaaaaatgtgcatttaatgcactaccagcccaaaccactagttgtggcctatcactctctcgactgcaatagcagcactaacgtcgctaagtagccatgtatattgaaaaaatgcatggccttggttgcctacttggttgcctcgctttgcattgctttgcaccttccagtaacgttgcacaatgactggcttgtgcaacttgtgtagcgcaagactcctagtgtcgtgtgaatattgcttaatgtcgtctgataacaaactcacctagggtggttcttacgaaatgcgtgcgaacctcgttccaattcatccaaaaaccttccccgcaagactgttatttttttccggtttgttttttaactgcgagttacatgtagacccaaatcgccttcatacatgcgctggttggtagtcggtccaaggttttcgaggaaggaaattacgttgattaactacacctttgtgcggcctacttcgtaccaacgtgcaatcaaatccgaaagtcgcaaaattcatattgcaaatttctagttagcaacttcaattacgcattcaaagatggaattacggcaatcaaattcgtacagtaggctgctactactggtctgttacatgccgtacaccatgtcctcgttgttcgccgccttggtgacgaagtcgcgacagtgcagctccatgctggccaccagcgctggggtcatcacgttcatgttagcggtcgcggcgcgctccaggatgtgcatctggcgttccgaaatggagaggatctcaccgttgctgtctggctcacgcgagcgatcgtagattgcgtagcgatccagagccaagtctcacttaatgcgggattttaggacactgcttctcgaggacggtgtagcgagtaacgcggccttggagggacatctgcgaagaagaaggcgaattgcgaagtgagctcccgtcggctatagtgcgcgccaaaccacgcgcccttgctttttggcgcgagcacagcacgccagcttacgtagccatggagatcttggacctctggtccaactttgattgccgtaattccatctttgaatgcgtaattgaagttgctaacgtgtctgctggatatctacgatgctttctgcggctggccaagtaacgaaacctttctttcaaaaacactcgaccctaatgagaatacctgcagcttcgaacagcaacggagctggcttcgtgggctttataacgaactcacacaaatatttcatcgggttgaaatcgcagtgggtggctctggattcacgaggtctacagacggattcacttcaaagtgggtgtgaaaaagtctaacaagacaaccttgttcccattccttcaacgttcgaccctaaaactacttttccgccccaaatctcaagaacgtgacgagcatcctatctgtcgtgacgtacaaggtacaagtgcctctgatgtcaccaaatttgtccagttttgcaagaaacaacggcaagtactcctaccggtgcagcaaatgagaattgcatatcggctgttgcctgtgagatctcgattctggtttctagcgcaccaaataccaaatgttcagcagtgcccttactacggctgcgcagcaccttttcttcgagtgccgccactcaaacgaaatctggaaagccctctggaaggaccggagtatctttttcgaaggaggcatcagttggacttccatggtactcccgcacaagcaggaaattcggtcagcaaggtcccaccgcagagaggcagtgctttgcctatggaatatagtgagatgcgcagcatttcaccgccaatggactgagaggaacaaagtttgtttcgaggatggaggaccagaaccccttgaaacagcgatgtcaagcatttacagcacattcagctccaactatcgacgtctcctaagagtatcaaactccgaagatcaaaccaagttgttacaacggcttcgatactccaaaatttggcgactttatcagcagacatgacagtagattcaagcttcgtcatgtacaactacatttaacctcccgctctggcgtggtgttccgcactgttgccgagtaagtagcgccctagttcacataaattgagaagtcagataattcggtaatcgaacacatcttcttcttcttccctttagccaccagcagcattcgcagagctattttaatattaaaattgaggtgttcatttccgcacgcctggaacaaaccaaggtttaactgtaaactacgcgacctttgaaccatatttccaattgcagtggccgcttctgttggttcgaacttcggatagcctgtctttcgcaaaaagccgcatgcccaaccaggcgtgtggatgaatcgcgccgacaggccgacatggctggtgtcgggcaataacaacaggttgggtcgcacgtaatgaagttattgcacaagagcagcatgtacaatgctttcctttttctctttcacgtatcccgcctcgctgctactacagtaagcaggcttaagctatcaccgacgggtggctctgatctccgagtgggaagtgtattgaaaaacacgatctgcgctaccgagcagacacggatgtgacccaaaacattagctgtgggtattccttaggactattttaaagttgctgtagtgctacgaagcaaaccgaagtttccttcctgcgatacgaaagcacgttgggggcaaaggtggtcgttcttgattaatgaggcgagcctcggtgagggtcatgtaatgagccgagatgaggcagcctagggagtggagtggtgggtgtcgaatcgaagcgcgggcgattggtcgagccgcagcgctggtgtcttggccgtcggaatgccgcttgtgtccgagcaggtgaaagcgcgactggccggccgagacgatcaagaacgactacctatctataactactctgtgcgatgtggcggagcaaaaaccggtgggccctcagaaccgaaggttcctcggaccccggggtgaaaaccgcttatcggacagtctatcctaaccatagccatggggctctccagcatgagcgggtcgctgaacttgatgcagctgagcgcgaaccatgactgggctccagttgtggcaacgtggctttctcctcttgtgcaggaaaacttaatttccacctcgcttcgcttgatggaaataccgactctgttgttggtttagaggtcaatctcaaagtgatctctatctatgggtccgctggtagcttctgcgggcgacactaactagcgccttctgccagcgacggataccaaaccgtcatcgcattggtttcactattttcctctatcctactgcaagcttgatggtgtcgatccgtagacgtcacccgatgagtgggctgagcttgcttcttgaaactcttgcgagctggccggcatcctcgataacacggcggaccagtggtgtcgaacgacttcctgcacgacaaacactcgagcacatttgacgcggacgcatgcaagtatattccccggggacatgtatccgattggattgaaattagacgataaattaaaaagtgtttgtcgtctgaggctctacaatacaccataataaagcagctggctgtgtcaactgtaagactgcaggtggtcactacgagaaatgattgtcgttctaaatctggcgccatgccattgatgatgatgaggtatattggacaactggttgaaccgagtcttaacaaccatcttccctgctgcagcattccggggaacttggatttcaggttctctggtgatggatcaaacgtctgccgcgactccgccgcggccatcgttagcctacatgagccttgggcgccatcagggccgccgaaactagcatggccataaaaataatgggccatcataacataaataaatttattgtggactgaatacctagcacatatcataatttatgtagcgaatctacccaatgtcataatttatgactacaatttataccctactatatatcatatttattaaatctgaaatcctagtaagtatcatcgttttaccttaaaaaattattagcctttcaaaaccaaccgttgtagtggctggtggcagcctctaagggcgttcaaatgcctgttgttgtcattgttgattttgcaaaaaccccagcagcccacaccccagcaactcagtcttcccagctatggtctttgtgtcccgcccgccgcgcccaacgttcacgccggcccaggtcacagggttctttttccaaccgtgccgcgacgacttcgacgaagttatccctgagtacttccgttgtcgctgcggcacggttcgaaagcagacccgccgcaacgggtttaccaacctcatgcagcacatgaggcgtgagcatccgaacttcgaggccgagatgcttgaggccaccacagcagagacggggtcattgctgagctacgtgcgccgctcctcgcaaaacctctacgggtggctagtctgggttgtcatgagcaacctcccgcttgccttttgcgagaatcgaacgacacggcggtacgttagaagcaatttgatttaccctgattaactatcccgatttaattccatatttctgtttatctgtagctacacgaacttggaccctgtctgtatcgagacgctgcgtgccgtactggagggggtctcgctggcagtcgagaggtcgattgcggcagaaattcgtccgcaatttggcctgatcctggatgggtggatccacttgggcgagcactacctcgcggtctttgccccctacgaggttaacggtcaggtaatgaccccactgctttgcatggcgcctctcctccaagaggaagacgatgatctctctgctgtggcacatagagaatttctagccaacatgctcccgcgcgactttggtaagcagctggaccagtgtgtctacattgtgggcgacaactgccgcgtgaacaggcgccttgcgactttggtcggtgtccctcttattcggtgcgcctcgcattgactcaaccgtgcggtgcagaaagaactcgaagatcacgaggcggatctttcagatgtgcagagcctgatgaccaagcttcgaacgctggctcaatctgctaaactccggtacgatttatttgtttcggcgaaatattttttctaactctttttacttattatttttactaattcgcgtcaaattatttttttcaatttaaattcagactcaaaacgaagctccgaccggtaattcggcaggacacccggtggagctctactttcaccatgctgcaccgatacttcgagcttttggagcacctagatgcccacgacgatgacattgcagatcttctccccgccccagccagtaaccgtcgcctccgtgcccttctcaaagagctcaaggacgtggagtcggtctcaaaggcacttcaaggggaggatgcggaccttcttgatgtgcgcgagtggtttgacgggctcattgccgtcaagcccgactacgccaactatctcggtaagctcttaccggaatctgattttgctaattggaatactcacaatgactattatgtactacaacagggccaagagcggacatcgtccacagacccgacttcgagtcgggttgtgtgcgtgtgctactcggcaacaccaaccgactcaccagggctgagaaagccgtacttcgggcgttcgccgcgaatatgacgcgggatccatcgactgacgacgactctcaaggctccttcgtggagcgtttgcagaaacgtagacgtctcgctcagcaccagcagcagtatcaactgcttcgcagtatccctccgccgtctaatgtcgtctagcggttcttcagtgttgcccgcatcacgcttgggcacgagcgcaacggactgcacccgattacgcaggaacaaaatttgttccagcgtcagaacgcgagctattggaacgtaggtactgtagatggtctgcgtaactaagttaatacaaagttgcgcacttacacaacgccgttatctatgtatggatggtactcatgtcattatttttgcagtgggtttttcttgcaagcgacattatttatttgccgattctgtcatcataaatataaatgccataatcggcggccctgggcgccatgccattgctgtcgactttgcgaaagcagacacaatgacgccatgccgctcctaacagatagtgtgcaactccgctttacgcagggagcagcatctctagctgctctactggcatcaattgtatggatagacccccacaaaggaggcacgcggaacgtcatgttcttgagcttgcctttcggcactggcaggcggagacggtccttcccgaccttggccaggccgtccacgggcagctgccgcacctgcatctccgtcgctgcgtccaccgccctccacgatgccgaactgatcgttgatcacctcgtgcacgacgcgttccacacgggttgcgctcgaacatgtggatcaagataagattcataaataagggttagttatggataaatttcaatgactaattatgatttacttaagtatcagatttatttacggatcacatcctacttttgaggttgctgggcttatatcagacgaagccgcttacgatattacgtagcacaatgcctatgtcgtcgtactcggccattacagtcttatttgaggtcgtgggctatttggtaggagtacagtagctacggaagcaatggaagaatgttagatatcagcttggggatggagcattcttaggcagcagcaacctcggacaaatccgttggcctgcctccgtgccttctcgatgcatctgtaaactggaagacatatgtgcacgccgagaacccaagacatgtacgcaggcgcaccttgcactcggccaacacgtcagtactataggatagagtggtgcagcactatgaagtgtaaattacccaaattctcgaccgatttcctatcctagtaggcatttggggtgaggatcacaatagaagctgcttagtaaaatcactctacaatatcatttgagtaatagtggtgaaagggtgttttattttgttgttcaagtatctccacaggatagtaccggatgcacatgaaacttagccgaggtacatcgaattcatccgtttcgcgtatggtacgtggaattcaacagaaatgtacatgaagttaatcttttctctccaccgagccgtcgaacttgctgtgcgtcgagtcgcacttgaacaggtacgcgagttccatgaacgggtcgttgatgaccaccagcttgttctcaatggatgccaatggcgacttactcaggcggcggtggttgtaagttgggaaaaccttttttttatgcatccactactttgtattggggacccaggtggcagttcgaagctagcttgtacggatacctgtagagggaaacgatatatttgggcatctactgcctaatccaccactgtacaaccaagtgtaccaagtttgatcgcttcttttcaaagacgttgccagtctatatatcgccactccgatgaattgaacatcaacgcagttaattgagttggcacttcaacggttagggctcctcgtgcttgtcggatcaggatgtcacggatttagttttaagtttagttgttctgtagttagcagaatggttatcaacaactagctaatcaacgtaatttccttcctaaaatgtgcgctgatgcccaggtagtatcctttgccgtgttgtgttcggaaacttaccggtggcgataaaagaagaaaatcgtgcatatgaatatttaccgctgccaggctaaccgctcaactgaacttgctgggaaacctgatgaagccagtaatttgtttcaagtttgataagtaaaaaaataaggtctagcacgtgtaggagtaggatacaccgggtttttgtccttcattttgatactgttccctcgggcatcctctcgcgcaggaatccggggcgtacagcgacgacgtagcttaaaagcattcgaacgctgtttgatacaacatggcgcagtcgcacacatattttgtcatgatcgcctgaatatctaacaacatcgattcgtccaagtgtgttattgccaattatcaagtattaaaagctggccctaccgtattcatgtagcattaggatgctctgaactaatatcggtaacgacgtatttcgaagttgtttgacaagaacaggatcaagtagtgcataatggtattaatacaccaccagcagtaaatgggctcgggggatccctgcgatcgcaatgtagtctcacacaaagcaagaataatatcaatgatattaggcattttatctgcaaagactttggatgatataatatcatccaaagtctttgcagataaaatacctgagcgaagagatgagaacggagaagaatgtctattccttggcgtattccgaactgacggactgactgactgactgaggtcctattgctacggcgaatcctgacctcaaatcctacttgaaatactgcatgacttactgtgcgttcatgataactatgggataccggtgtcagaccggttctcccagaccacctaactcgattaatatgagctaggtttcttccggtttcatacacggttgtcattctttttgcgctagcttctagccttttctccggagaagacataccattagggtcggaaaaaataatacaataacaattattacggtattgctccactaaaacaattgattattgagaatcggcgtattgcaatgattattattgagccttgtaagcttcaatatttggcggtattttatcaacatagaaatgtcaagctaaaaggcaagctcaatacaataattactgtattgttccactaaactaattgattattggtgggagtcgtattgcaatgattattacggaagaaagaaacctgcaatacaattggcgctcccacttccgacaccgtggcccacccttaattgtcagagtgctaaattcaataaattcaataaagtttggtaggtagaagaccagttagggccgaaggtgctgcagtgtgcttgcagaactacgtgcccacgcgcttcgaggacgcgccaggccgcaccatggcgaagagggaggtgcgcttcaaaaacatgcccatcacagccgacgtggtggaggacgagagtaacgagagtatgaccgagctgctgacaatctagaaaacggtcaggagtctggccgctagcttttactccagtggcgctggcaccggtgttgggcaagcccggcggggcgagataacatacaacagcgtaccacaggccggcatcaggcgccgtccaccgcagttcctgccgcgaactaccaggaaataggagactgagctcaaactgctgggaaatgtgtcttgttcgtatacagtttggcgggttttactggctggtagcgcttacaaactttttaccaataggtttctttaaaaatacttacggcattctaattggttgaagctaaagtggcgcggaactggcagattgcacgcgactggcaccgtaccttagtgtacaatccgcgtgccgcaagaatggctcgctggaggcaatgcggcagtgctccagcaacaaatataggagtatccacacgcgtggaaaaacacgggtaatgcttgagatcgaacccgcgtttacggataactgagacgcagcagcaagctatcggaactcgacttcgaggtcgacgagcgcaatgggtagtgtactcaaattgctggtgtaatataaccctctgataataagaaggtgatgcgtgtaagtattcattaactctggcagttttgatttggcgggaaacacagtatgacgaaagcaacgaaaccagcgacgagagggagagtggcggcaaatgcctgcattttggccatatttccctcattcgtttatcaatccagtacaacataccacatgagataacactaaattcttctataactacatcccggtattgatcttgcaggcgtttaagtatcgtgcctccaccttttagagtagccaaggggctgtatggaactgagaacgcacttcgcgtgaactacgtaagctctagcgctgaacaaatggtcctacccttaatattaaaggccgcggttccttgatgagctaacaaaagaacgcgtttcgaattccttcgcgatgaccagtgttcaccaaatacattatgaagatctttcacgatgtgttttatcagccagctttttccggaccctccctctccgtgtatgaccattctaattgcttcgcattcgctattgccagtagccgcctggtaccgtttacgtgactggttcatcgctagcgcgaacggaatccactgcgaatcatccataacatcagttgcaaaatcatcgttcgggccacaaataggatatttgtaataaaaaagctgatctccatttgtcgatacggtgctatgattatctgtagattctagatgcattttcacccatggccttacatactgctttataaattctcgtgctttaatcacatcctcgattgtgtatgtatgtctacaccttttgccgtccattctcgggttaatctccgaccaaatttggcatgaccattttttggatacacaaaaagtatccaaactcagaagtaccactgtattatctcaatcaaagctggctaatccccattcgatgtagttaaaattggcgagattctgacgttcaaaggcgcgctacggaaacgctttcgcgcgcgcgcgaaatggcctaccgacgcgtggaaggaaggtcgcttcatgctttcattcctcattcttccctgagccccacagatgtcctcctaagcaaccttcgagcgccacacctcggaataacgccgccgcgtcttggactccttccagagcggcggcgactggcgcaccactgcccagcacaacgggttcgcgcggtccacggctgagtacctcgtgcagcacggccgagtcgactaccttcctcgcggctgtcggagctggtagtggcagatcgagctccgctgttcgccagaactgcaatggttgactgtacctcagtatggagcttctagttgaagtatcgctcctgtttatactgaggtttctgtggtatagtttaaccaagagggggttgtcacccgagaggttttctcctcctcaatcccattttttccgtgggtaacgaagctcgtgttctgcgttctcgagtctagtcctcctcggccttcgccactacgtgcccggaagcacagacatcctactgcgtaagccctcaggttatgagcccaaatcgctggggctttacaaactactctcgcgaagctctgaaggactatggcctcgccgagtacgtcgactgcggcatcaagtggccaaggtggatcggctactggttcagttggttcaagtacgactggtgtatctatggtggcatctacggccactaccacggtggcctgtagcatggctcctgcaacgactgcagccacgagtactgtcggtggtggcattgaccctagtgctgtggccggactcgctggtgctgtggctggcctccctggtactggtgctgtaccaagagtcgcagcaagtgctggaggtgcttttggagctggagtcgctggtggtataccgagtgcaggcatggcgactggtgtcggagttccaattgtgcctaacctaaatgcaagtggaggtgactacaattctggtggcttcaactttggtgcatttccgcctggagctggatatggctaccctcgcgcaggagtactggtaaagatggataatgcgccacgaatgaagggaagttttgatctctatgctgttcaacttcggactttcttgacccgcatggattgctggagtgttgtcgatgggaccttcgacctgaatgatcccgtgcaggcactgagttttgcagcaaaggataacgtcgctcgtgaagctattttgtctggtatgcccgcgcaggatgctgagatgatatgccaggaagacacggcacaggcgatgtggaaccgcttcgttgataagcaggcgaagcgagagtactccaattacatcatcgctcgtgctgagttcttctctaatgtgtatacatcggagaagagcatggatcagtggttgcgcgagatggagtcgctgcgccatcagcttctacactatggcaagcgcgtgactaatgatgactatgcggagacacttttgggtcacgtcgctcgtacccatcgcggcgtggtgcggcaattctcgaagcattacattgtatggcgggatggtgggtcagatagcccggtacctactgctacccaagtaatgaatgctctacgcgctgaatctgcactggacgagaaaacaggtgctgaagagcagaggccagtgggtgttgctgcgtgtggtaagcagtctacacctccgaagcagaagcaagactcggtatttccatcaagcgaagcgaggtgcacaagaggagaaagccacgttgccacaactggggcccagtcatggttcgcgctcagctgcatcaagttcagcgacccgctcatgctggagagccccatggctatgattgggatagactgtccgataagcggtttcacccgggggtccgaggaaccttcggttctgagggcccaccggtttttgctccgccacatggcacagagtagttatagataggtagtcgttcttgatcgtctcggccggccagtcgcgctttcacctgctcggacacaagcggcattccgacggccaagacaccagcgctgcggctcacccgtcgtggtggtcgtaaatgtatgtagcctttggtgtgtctacaccaaggtcgagaaagtctttcgaacatctaacaaacgtcgtatctgttacaagttacaagtgactgtagccacttgtgcgtgtaaccctgttacaccgacagccgccgacatgcccggcaccgacgccacggacgacacagacggcatgcccaaggccatcgacacggacgacacagacgacactgacgacatggccaaggcccccgacatggacgacacggacggcatggccaaggcccacgaaatacccggcacgaacagcacgctcggtgtcctccccaagctcggctcagtgagcctgtgtgcagtcccggatggtcccggcaagcaatccacgatcgaggccctcgacatacccggcaccaacgccatgccgacgacctcgtctagttcagcacgcccgtggtccccgaccagccctgcgcgagcagcacgctcgcggacccagaccatcacggcacggatggcagaccgcggcccccgatctgctcgacacggaccccatgcctgcggacccaaagcacccccaatacggacggcacggccacggctttgatcaagcccagaatggactgcatgctcgcggaccagtccggcccggagcggatctcatgcacgcggccaccgatcagcccgactcgggctgcatgccgattctctactacatcgacttggacagtacgcttgcagtccccgccaagcccgataccgagcgcacgttcgttgcgatcgacaacttcgccactgacggcacgcccgcgccccacatggacagcctgtcgtagcctccagtgagcctcgtagatcggcgaacgaccggagcccatgctaggtttagtttacattcgattaacggagcaatatatcaaaccgtttgcttgatatactgaaacctagtcaaaaaatctcaatactgacttatcaaagtcaataacgacatgatatactaaaatttcgataaacatgtcaatgtcgacatctctgaatcaaccatgacacttctatactaagaactatacaaacaagccagtgttgacgagcccgcgaaaccacgttgtcgtggttggccatacaaaatccaatacgcatagccacgtggccacaatcaccattgcttcatgatatcacactgaaatccacagatgcacgctcattcggcagagtagccatatcatcggagcaccattgatgttcttgtcttcataggtctctcagggtctacacgcctccaacgcatccatctacttacgttggagctacgaatttggaaggcgtcaaacatgcatttggcgtggagctacccaagcgggcaagatatcgtgctggcaaacatcaagagttgcagtagcctgccatcgagcagcggaagcatgaatcaacgcgctctgcaggagtgacagaggtggatcgatgtacaccatatttcaagccgcatcacggactcagtgacttcctcacgtgcagtacgtcttcctcatattcgaacggtcttgtacggccacggcttcacccgcagcatacaataacactctagatactgaacggattgcttattgaccaggattctgggtattatatctctcacgctgacagactatcacggcaggcttgctgcctcagcgtccgtatgctcgcgagggactgtccccgccgctgccacacagggtcatcccgagcagattaaaatacgatgataccaaatgtgagtctatcaagtactctgctcacgtatcacaccattctggtttggattctctacagatggggatatctcgaattttagggaaaaataggccaaggttttttccagttgagtcttgaaccagctcagtattacgcacatagccggaatttgatcagataactctgaccaatgagattcagacctaatggaacccaaagggtcggcgccggccgctggggacgtcacttacccaaccccacaagtatacaaatttctatattaatcttatccctgcgaaatcggaataagagcggtcgcaggtgggttaacgagtctaatacaggataagctttttgtcgagtcgtgtctaatacaggctctcgcgctgggggggggggggggggggggttaaataatcctggacgaatcctggacgagatacataggaagcctggttgaagcaggattaaaatcctggcctccaacgcccgccatcaaaatttcgcgccacacgatgagtccttgtttctttcggaacacctcggcatcagcatgcttctctcgtggttcatctgagcagagctctgccgtctttccttgcgaatccgacagtgctttcgcgcgcaaatcagccaaatgttgggcgacaggtgtttcctcctccctatactttaaccaagctaaaatatatttccacactccgtagagagtcgcctgcaaagaaccgactagctgaagctcgggtaaaaacggcgttagtgcgagtatgcccacaaacggagtgtaaccctagtggaaatgaaagtacgatgacaaatctactacagctgaagtaagtccaactagctaagcgcattaagggctcgttgcaatcagcaagaaacatccgaaccgtttcttattgcacgctagcttacaattacgtttcctcgtgcacagaagcactgtgcatgcagtgtctgctgcgtatataggtaccgtcgattcacaaagctagctgctcgctgatgtacagataatatgtgtggtcttccccgagagccttttcactagagcgttaattaaaacaactatgtttctaacttggcaacacattctctggaatgactatcctccagcgaaatcaaaggctatggtaacgcgttcagcggtgtagttcgatctcaccagcgtcaatgattcgaaaaggaccaccccaggtatggatatcttacatgttaaaatgtgtacatgtaggtctctggatgctcctttggcgaaccaatgcagcaaagcgacgaaccaggccgaatatacagattttgtctatacctaacttaaattgcggctatgttgtgtgatttttactctgggtgggtcaattcgcagttcgaaagaactgtgttttgacgaggtgtcaacgcgtctgtttgtaaacccctttagttcgagtcccacaaggggcaagactttcagccggggtagagcggggtcgatagtgtaatggacagaccctacaacacatcttgacatggcttacaccacccaagagggccggttttcaaatatctctgtaaacccctttagagcctgttcgctacgtagctggagttgacactatcaaaaccgcgacggaatttgattggtcaaaatgttactctgcacaacaacacaactggagaccaacgcagatctccttctctacctccgagaggtggagaaggctccagatacctagagacgctagtagagagtcctatgacgaggaagttgttgtggttgcgacgagttcggccattccccaggatcaacttcgagacccccaaggcggaaagtctccgtagccaccaaattccatgctgcagcctactgcttcgggcttcaagagccctgaaagcgatgcttcatcgtgacgaagtggaggcacagcagctctgctgctatcttcgccgtccaagcaaattctggctttgaatcaggggcaggataggttgttgggatgcataaagggcccgtggtccgacttcggccgtgaaatgcaccagcaccggtgttggtggcggcgttgcgaccgacggaggcaccgatagtcgccggcagctgtcggatctttcgtacgtgattggctaatatctgcctggagacgatctgggtagtgtctcaactggagatggatatctcagctttttgcgatcatctccatctccagctctgtaaggaacaggcgcctaggcatcttttaaatagtgacatggaacgtcaacttgaatcatgggttgtccgctttcacccgacctgcgctagtgcaacgattcctatatgctatggtcaatatcaagcatgcatcaggcctttttttctgttgtaccgcgagtatgctagcgcgcatgtattagtattggggcgattcccacaggatttacataccacgaattaggtcaccatgggatagatacaagatccaaacgctgctcatgagctaaaaccatataattgtggcgaagcccccccccctataatcatgtagctctcatttcgcttactctgttttattactcctatttactttttttaccaagtggatacatcaattattgctaatacacgggctgctggtgagcagtaatttggctgaaggttcccactcactcgagtacttgacgcctgcggcgcaagtgggaactttagccagattattgcgctgcctgtcgtggcgttctgcctcggcactcacgtgtttcaacctctacctctatcaattcaactagcgctatgactgtaactctatgcagtagcggtggtgtggatcctaacacctctcacggaagtgtcgatgtagggctggagatcgttgcagtgcacaagcggaacggtcgcgttgtcgacgttagattcagctgaggggtgcgtaacaaggtcctaagtagtggtggcgaggctagagcaggtgataaggcttgtcatagtgctttatgttcttttcgttttagcatacgatggatagttgccttaccaacgttcaaatagatgtttgcttgcaagattaggcgtagacgcacctgtggactgtgggtagagatacactacctagacgaaggcggtcgtacttttaattttacaatagctggcggcacgggatgtgctcttaactaactagcgtacaatccgcgtgccacaagaatggctcgctggaggcaatgaggcagtgctcctgcaacaaatataggagtatccacacgcgtggactgttacgaatcatttttgatttacgaaaaaaaaacacgggtaacgcttgaaatcgaaccggcgttacggataactctgacgcagcagcaagttaactgaacgctacttttaggttgcttaacgcttttgcttaagagcagggggggggggggtcgtatgagtttgaacggacttgaatcaagcgtagacggcgggtagatctgaatttgctggtagcccaccaaggcaacaagggtggtataatggctagaggggttctcgttccggacaacgccgccgccgccctaatggtggaagtagacgtagaactacaagagcaagaacagcaagagcgcgccgtattatgtcggtgaagggccttcggggggttggcaagggtattggcgagattccgattgtttccctgaccatgctcatgtgcgtttgttccgtggagcgcctggcaaacgaccgcggaagtcgggtcaccttcgttgatgcttttatgcagccacacttgtctgtgtacagccagaagttggacatgctggacgcgttccgtaaggggtgtcgtgtggtgagaatcaccgtgtgggacccaaaacagcgctctgtggccagacctcgtttccaagttggtggcgtgtgcgagttgaagaagattcacggcctcaaattctaccacgaccatctgcaaggcagcgtgcaggcgttgggactgactaacccagggctgattgaggagtatcaagactttgagactgcgctgcgtgcgcgcgcggaacaccaatccaatgaagaagccgaagcgttgatgccgtgatggagatcgttgcgatgcccaagtgaggcgatcacatgtacgacgccaagtgatttggttagcaggggtttactgggttccttgcgtttttggaccttgggggtgcaagcgatggttatgctggtacataccctcggcaattcggattgcaatataagcattttcgggcctacgcaaaacgatactggttagtaccaccataacttctagtgaatgacaatgcatacctgcttggtcgtcttccgcatacgtgtgtaacgttacgaaaatgtgagctcggcgtcgcattcaatatcagcaatggcaaataagccacagcagacttctccattgatgtcccagcgctctagtctgctgtttggcgcacaactgtggttggcaaatcgcacaagggagccttgtcgtgaagcgtcaattacttcactgtcagttggttgtacgccatagtaataccgactgcctcgcatattcttcacaacgcacaaccacatgcatattcaagcgtattataataagaatataggataccatggattgaaggacatacctcacatctccggtaaaactcccctcgttgaataacctcccccatgtattcgatgatgaatgcatctttctcgatgtattggtcggtaaagaggccaatgcccctttctccgctgcttcgtagcgaaagtcgcaaggataagccccgttgaaacctctgataggagcagtcagtgtttgttttccactggccccgaatacactccacattcatctgtttcaaacaagaccaatgcaagcaacaaccatccgctgatatgacgacacgttcaccacgtacgggtcgattttcgcatcctgaccctcagggcaatccacccgtgtctgaggtattgcaccgacacaaaggcaagtcgttctttgcacacatgttagtacttattgtgaaaaccgattagaatgtcttattggattgttaatccaccgatttagtggcttaataagaccgacgacccccgatttgataaatccgacctcctaattagactggggtacctcgattttatactcaagattactacctagacaactttcagagtcagagcttatgcatttgctaatcgaccgattaagccagagccggccgatttgcttgctattcaggcggaatgtccgatgtgcaaccggcattcgcaccttgtaggctaaatcagccaccagacaacaatcgttgcagtcgctcttggctaggtagtcaaggttataacactaacatcagaactaagcaggaaaaaccgcacgctataatacatgtaactgagatatccaggcgacgcggtgttgccgatggacttggcgagtctccggccgaagtacatgacagtacatcgaaattgctaggctgcacataattacgggaccgatgaacgatttatactccgattataattaggacatccccgatttattagtcttcaaatccgctatgagcgatgtttaaccggctaattcagcaggacaaactattcggttttcacaatatatagtgcataattaattgatactaacctcagctagactcgaccgagatcgataattacacacattgcacgaaagctgctcgtattcagcgtatgcttgaacgacataccttgtttcaagaagctatggcatacagtgttaaaatttcaacgtatttcaggcgcggctacatacaatgcacaacgttaccaggccttccgtgaagcgagcacgcttgaagcgtgcatcttcgcctctgtgcaggtatggatcgagcttcagttggactaacctctttttcgacatctgttctattcgtagcaaaaagagaagcgagagacgaccacggacgtttcctcggtattgatgccaggacacattttcttaaaaaggtgtcccacttcattgtcccgtttgcgaagcttaaaaatgaagtcagccctatttcccctggctgaaacgcccattgaattataccggctttttcctaattatgtgtcgtgcttcgccatcgccagcacattgatattttgggagagctagatttgcatacaattgtgagaagcgcatcatatgaagatgcttacaggttatgcaactactagaaaaacctaaaacaatatacaaagcatcgtcgcaagcgccaaactcgctattactaccttcggccttgtcacccactcgaacgtcaccgctcagctagagttctctcaaagccaacatcaagccgtacctcgcgctggcgagggacgagatgtccgcgcccatgacgcagctcggcggctgtgtccaatctagaagatggaagcgcgcatgcgcctttttgagcgcgctactcacgtctcgatgccccgcattacccagtgcatggtgcagaagatggagttgcatgcgtccaagttcgtgaacactgcgatccgcatggaagacatgaagtatggagcgtaagtacagtggaggaactaccctgttttgattgaggattagccagctttgattgagataatacagtggtacttctgagttttgtgtactcaaaaaatggtcatgccttggccggggattaacccaagaatgggcggcaaaacgtgtagacactatagttgtttcataggtatttctctgctgctcagtcggaggagagatcaggtgttgcttcacgctttcgttgggttgctggtcaacaaaaacatattccgatgctggtaacgacgacagaacctgagatgatcttgaatgctcaaggatgtcgatatttcgctgacgcgagaggatcaactccgattcctcttgtatctcactagtcaatgttgcttattgctccctttcgaaggccttcagacaatcttcatctgtttccggaagatcagatagcgatcgccagggtttatgcaaacatatttcggcaaaacaaaagtttggacctgtagaatcaggagctatccaaggtgtcccgcggacgccatgagatttcgatttcgaacgtagcttgatatatcctttagaatcggctagttttaaatacgtgtccgtgttcgttgaagaaactgtgtcaactacagagtacttttcaacaaatgttgcaagcgtcattgcaccatatgggggttgaatgggctgctacccgtaggcagcccgcgctcagcgcggcttttgggaacagccagctaaaccgcaatcaaatcaaatcaaacggaatggggcgaagcgggcgtgccatgtaagctgcttctatcttctctattctagtgtcagcgttagacacaccaatgccgtgttttacacggtgaagctctggattttcgtaaacgtatctgtatggtagaagttcttattaagtgcctgagtattgtacgactgtactaagattgtcaaccataaaacccgagctagtacgtagaaaaaaaaacggtgcaatccatgataaattttaaacctgttccgttgcgacttaggcgcgccacatgtgccgcaccagtcgctcgcttcaaacattgaatacatcagcgaaactccgtattttattttaaattttttaacagtaatgatgtcattacaactgaacttgcaaattcaacccccaagttgatgagtgttagtctcgcctcgtaaagcgttcatatctatagctaacccatctcttatcgcgttcctctcgagtcgcaacgctgatgcctgatagttagtatactgtacatgtcgacgagcaccagctatgcgaaatatgctccagcaaaggagccgcgcttcgaacgacattcacgcgaataaattacttcggtccatcgtaacttaccgatgatgttgcacttagacgccacaagcaacatccacctcctttgaatcctttttacaatggttatcaattattaaaggctcatcgaatcactcagcgtatcggactctattctcgatacgaacggaaataacgagtatgcaatataaggagaaaaaagccgctatattgggttcaagtatccagttgaattcctatataacatggatatcaggtttccaagtaagtttctcttagttttgagtatagatcgttagtttgggttcttcgtatacgaatttgaagtaagtttgggtcggagtgactccctccgttaactctggatataaaaaccagagaacttgccgatttcggatctaaatcagatgcctcgactctatacgtgtaatacctcaatatatatcaacttgtcctcgacaccgagttaagaaataaaaaaatgcatgctattcttaagcgcattgcaaactatacactatctattagagaggtcagtgctcaggaagcatattacattcttctccgcgagttacctctttatggcaagtcgaggcaagtgacgcgattaaaagtcatgcgtcacggtttgactcttccggcgtcgtccgaccgtgttgtttcaagacaatcagtcggcgatcaaggtgatcaaggctacgaagggcaactacaaaattaaaggtgttgacttgaagtatcacaaggtgcgagatctgtatgaacgtggagatttcgatgtacgctactgccctacgacggatatgcttccaggcatttttactaagccgcttggatcgacgcagttctgcaactacgtgagcgcctgaatgtggtgccgctgccgttggcggattgcactgccaattaagtgatgattgcgtggcggatctcgaagtgggagtgtcggagctggtagtggcagatcgagctccgctgcgaactgcgcacggtccacggccgagtcgaccaccttcctcgcagcggcgcgcgggccacgaaggtgaccgcggagatcaaggcggcccttgagctctggctcaacgagtgttgctcgtatacgctgggcacgttgcgggctatcgtgtaagaggtgcgcctctccgagacgaccatctctcgccacctcaaaggcgagaacgacgacctggtcttgctgcgcctggggccctacagcaccatgtgcaacccgattgagaactgtttcgatatattcaatctttgtttctatcaactggctgatcgggatatgagttgtgtgcgtccaggtgatcatcacggagcattcagcagcagcaataaactcagtaccgcaggtgtcatcttgggtaatcgactgcttatggctcttgtaggcgtaagtacatccatcatctgaagcacaaaacccgtgatagatttgcgatcaacattttcactaccgagatccgcatcagaataagccgtgaaatgcaaatcagggcttgcgggcttcttccacaagagtccataatcacgagtgcccttaaagtaccgtaacactcgctttgccatcacaaaatgctccttggtgtacttgctcatgtatttgccaagggttcgcactgcatttgcgatctccggtcgtgtgccttgcaccaggtactggcgacaacccactagctctctgtagggtattctggggtcattaacccccggatcggcctcctccacaggttcaggcaggtttccaagtgcctgaggagtggcaacatgccgacagtcctccatgctaaagcgcttcagcactttgttaatgtagccacgttgcgacttccacaatgcctcaccggaaaataggaaatctccatgtgcgatagatccgtaacaggtcctacgtctttgatcttgaacttagcttgcagttcacgcagaactagctcaatgttctcatcagtccccaccataatcaaatcgtccacataaactgcaacaaatatcggactgcctcccactgagcgcgtgtggatgcctccgtccatcttagttcggcgaaaaccacactgcctcaaatatttgtccagggtctgataccagatcaacggcgcctgtttcaatccgtataagctgcgcaacaacttacacacgcgacccgatccatcgtcaaaatactcaggcatttccatgtagatctcgacgtcatcatcaattggtccatttaagaacgcagttacaaagtccacatgacgggtggaaagccccaagtggagagccaacagcaggataactgcttcctgacatactatgggagcatacgtctcccggtaatcaacaccatagctctgctgacatcctttgatagtgatcctagcacggtgctgcacaacattgccctggccatctcgcttcttcaccagtacccacttgcctgtcagcaccttcttgtccttgggccgctcgaccagctcccacgtattgttccgcatgaggtcgccatactccttctccagagcctcaatccatttctctgcatctggtccagacaaaggttcatcaattgtctgcggctccatcagaaaattcacggcctcaattaccaaacttaacggaaggcccacttcatagtcctggtacttcggattaggtgcgcgtcgaaacgacttggccgtatcacttagctcttcctcgtcctcatcgctcccactgtcactaagaacattagcaactttcgtcatcggaacagcgcgatctccggacgcgataggaacaggcatcttctcctcgagactatcatcttcagctgcatcgagatcaacgttccagtcaacctcaccgccagccactctctcccccaccgaaggtgagattcctcgcgatatctcaggcagctgaccagcaacaggatcgctgttaggcagaccccactggtcttgcacttcctgaccgacatcatcctcagcacgcatgtttcgaaaggggttagccccacgcaacatcggcagatcacccaccgcagcaggaagagttaccccaggatccctcaacgaagtagcaggcgcacctgcaccaatcggagtatccacttcagtagtaagagtagcagctgcttcaccatcgcaacggcggcgctttgaaggatgttcagcagaggtcaaatcactgttatcacatgttacaccagtcactgggagccgaacaaaaggaatcactccaggcagagtacctttacgtcctttgccataggtattcgcgagcaagcgatccacatagcttcggtcaactgtccatccttcgtgaaattccacagaccgaacctcctgcaccttgccagttatcatactcagtacacggaagctctcggagtgctgagcaaaacccatggacaaacccgccttgccagggttctctagctttgacttccgtagcttttttcggtgtgaacacaaacactagacagccccacgtccgcaacttagtcacgtcaggccgttcaccaaagcgccgagagtaaggcgcctcaccgttcagagcctttgttgcggaaatatttctcccttcgacagcaaaaccaaatgcctccccacacagaaggtcaggcatgttcgccgcagtcaagatgccgcgcacttgcgctgcaacaataccgttcatacgctccacgagtccattttcttctgggctgtacccattcgtccaggtatactcgatcccttgaccagtgaggtacgtcgccattttatttttgaggagttcacggccttgatcggagttgaagacttcaatcctgtggccttgagcaacaagccacttcacgtgagcgaataccacctctgaggcatcctcctttctcgcagcagaaagccccacagatagcgacttgcctcatcttgtacgagctggaagtgagagtagccatcatacgtccgaacgcccatgtggcacatatccgacatgatcttctgaaatggtctttttgcccgacgactcttcgccttcttataggacattccagtcatctttcctcttcacagctccagcatggagtatcattatcgtcactcaagtcaccgctcattccagttaccacttgttgacgaaccatttgcttcagcatcggcaagttcaagtgagcgaatcggaggtgccaacgcaccagtgactcagcatcactgcgcctagcattacacttatgaccgcctgcagctgcgcgcccagcagcaccacgagtatccgcgccatcagcaccacgagcaccagcgtgcccagatccaggaacatcaacagcatcagtctcacgagcgacagctcgcactgctccatagcagcgtctccaccagcgcgcccacaacattggtgcaacgatggtacgtgatataccgtgcttgctgcagccttcaaggggtatctaccgcgagactttagcagcagtaattgcagacgtcctttggacagccatgcaacacgttgcgaatctcgaaatctagtctttagattccaaccgtctttctccatcacatccaggctgagtaaattatcaggagccgaaggcttgtacagaacttgctctaactgcaacgacacatcttggtgtggctggttgttgttgcgtacacgaatctggacactacccaccttctctccacctgagatactgccatcgtagccttggaagacatgcgctgagtcattgtgcaactgcaagagcacttctggccggttgcacacgtgcacatcccttgcggagtccaatgcccactcgacatcatctccatgcgagtcactcacagaactaaccactaacgtttcacgagaaatgcgaccaacatcattcactcgctttttcttactatcattctggttgctggatttgttctaccaacgcttgcgttaagacgtagcaaaccctttaccagcactttcataatcagacgagttggcacggtccgggcagttaggtcacaaatgaccaacttcaccacagtgaaagcaggtccgagtttcttccttatcactcttcttcgcattggatctactgtcttgctttccttccttctggttcttctttcgaccagctctcatcgctttgcacgggttttagtttttgcttcctgcgatatgaaggcacgttgggggcaaaggtggtcgttcttgattaatgaggcgagcctcggtgagggtcatctaatgagccgagatgaggcagcctagggagtggtgtggtgggtgtcgaatcgaagcgcgggcgattgacacgcgaccagcgtgaggtgaaaattgagcgcaacgtcttggtgccaaacgttcttggagcctcgaaccgccacgacacgcttggagcccttgttggtctgaaacgctgtttcgtccatgttgaacacgcgagacgcgtccaaacgattctcgaccacagccttgatcaacgagctaaaaaacagctcgagatcgctcttggtcacagcgttgcgggcctgagacgttcgggttgccagcatcgggtgtcaccccatgaagcggcggtaccacccgccaccaaccgtttgaccagtggccatggagctcatggtgccggctttgaagatgatctccttgcgacttgcggggtgaccgaccagttggcgcccgacaatccactcgaccaagcatgcctccgctggttgcgagagcagcgaagccgggccatgacgaacaggtgcgcggaagatgcctattttccccttcgcgacccatttcgtaagggtccgatacggaattggggtgctgtcgctgacactgcgggcgctgtcgccggcgaggacgcgcttcactgcagaattgaggcgtcggggtgcatagtgccgccgcttttcgtgctgccggggttgacagtcatgctcgaagttctagatggctgcgccatacccggagctgccgtcaccacctcgagctccgggttcatgaatgaatttctctttcttgagtggctgcgctttttttcggctagcgtacccaaggacgtgcatcgacctcttctcctgattctggatgggtgttcgtctcattactccgtggagatcatcttagaggcagctcggcttggcgtggttctgttgttgctgcctttgaacgcaacccacccgcttcaaccactggatgtcgctgtgttttcgtcgttcaaggcgaagctacgccgcctaaccgagatctacgttggcgagactggacgcaattcggtcgacaaagaggaagccattcggatggcaagcgcagcatgggtaggatgcaagatgggtgagaacgtcaaagcggggtttgctgggtgcggccttttccctccgtccaagcctcgaatggacatgtgcatcgacaatttccgacgcaacgggacccccgcatctacgaagctggcagcgtggctccggatcaaggacgtcgtgcagaaggaggtgctcgtgctaccgccgtccaagaagcggttgcgcaagacagcaacggtcgccggtcgtcttttgaccaaagaaacactggaagcgatggcacaaccgatgaagaagcccaagaaggcagccaagacgaagaagcatccgatggcaacgaaggcgacgaagatgaagagggtgccgtctccggtgccggagcctgtgcagctgcagttccagtctgcgtcgaagcacggtgaggcaaaccaacaggataaagttgtgtgggaggcgatagtttagtataaccaaagaaaaaagcttttgctggggcattttccaccacattgtcttcattgtttttgttgtttatttcctactttcgatagtggtacgttatccctctgtatgcctgggcccgctgtgatgtccggtttttgagatttgacgatctcaaaccgttatcagaggggaacccgactcatggtacttagcatactggcggtcaatgcgttcactcggtggcagccgtcggtggctttcgcagttctgtggcagccccctaatgctctaattgacagttagcccactactgttttggttgagttaatgctgccaggtggaatcgaaccaccgtcctctcggttatgatccgaggactttaccactaagctatggcagcgctgcctcttgagcacaaatcatactatatttatacacaaatcacataatattgtgtaccatattgtgatatcgtatatcctgtcttatacgatttcaaatgggtgcaaatcattttgtacagattgtttcggtgctgtcatgagatttgtcccccttacaaaaccacagataatatgcggcagataactggtcctgccgtgaatgggtttgcaaatagtcagtaactcctaattgagctctcgtttactgtagagctcagtaaaacagtctgctaacagaagagattgcgctctcttcagatatgcgtttacatctcaaaactaattgcccaataaaaagttatgagcaaaacagtgagcgggattacattaaggcacacaagtggcaccgtaccttagtaagttaagagcacgacccgagtcgctgtggtggttggcgaatccacaacctgtatcctagcaaagcttaactaggcgccactactggatacccatgatcgggcttgggattggttgcctggctttcctgggctgccagcaatggcaggtaagggcaggcagtagattagtatcagttctcaattagcatcccaaggaacaagcaatggacgttgttcttggtgggagttccagctcccaatctaccgtgttatacttgcctcaaggtgcaacacgtcacagtcgccagctatcgtatctctagcctacgacatgtagttggcagcggctgtatcaccaaaggtttgctgaaatcgcgctagttcctctgtcgtaccgtgcaatgtggcctcatgtagggcggcgccagcccaccgggttttagagacactaggtcacggtttctgctactgagctggcaaacggagtggaggccacctgggcctatgcacggtaccttcatctagccaccgccgtcctttagctactactagtagttaacggtacgcgaatggtagctgacctcgttcggcacaatgtcgttgattttgaagttttttggttgtattgagtatggcgcctctgtgatgaaatctctgtcacagtattggtgggaatgaatttgatacgcttgtttccaaaagcgaacaaagacacagggcacgattcagtcttaaatgaagctgaatcgttcaagcacgcaccgcgaaatgctgccggaagtactttcggcttgcttctcatcgttagaactgccgacttgcgcaccttgggtggacttcatttccgcttgttggctgcgatgcaatttgagaaatgacttatcgtacccgcttaaatacattcggctcagcccttgctgtttccggacacgcacatgacagttgaaaaggtagcaagaataggaggtatccacgatcggaaactttagcgagcatattggaattgattgtgttggagagctactgtcttcatcgttggcatgaattcggacgccatcgtaaccgtgttcattacagctcgatctatccgctgttcctcgtgagaaaatatctcgaattgatcccacgatgtagacatcttgttaagtgataggggaaaagtaagaataatatcatcttagaacgtactctggaaagagccacgtaagcaaaggaagcgctcgggatggatgatgagtgaaaaacaatttttgggcaagtccgaccttgtactttgtgcactgtgattgcgtatgctaaatgcagaggagtaccttcgcgaaaaacactcaggtcactcgctttttgctccaactcatctttctgggaaggtcagggactatgtttgaaacatgggggaggaatgaaggtcaattgtacaaatccgttatctggacaagtattatgggtaaccctgcagtctgttccatattgtatgtcaacttaactggtgcgccaacagccaactttacatcaatatcaaccactctatctcggtttgcgttggctacttccgcttcctgcagtggggcttggaccgattcggctgaaatagatcgtacgttagctagtcgtttcagcccgaccgtgtgtttagatctgatattccctattagggggttcagttaatcaatccttgaagcaatgagccgaagagaaattggcggaaaccaaggaaaaattttcatgggggttttagtttataaatagtcacacaaatcttttgatcgcgaggaatgggcccaaggaatgagcctccggaggattattccttgaaggaatgagctcattctttgggctcattgtttgaacaaatgattacttcagaccccctaattgggggtttcaaaatcaacgaaaatgcccaagatttgatttgcattggtcgagcaaatccgccttcgatcctcggcgtaccactgtattttgcaagtcccaaccccaccacctccagagctggtggatttgtaaatgcgctgttgtatggcaaagcttattaccacaatctatctctaggatttgcagtgatattgtggcaagatcgtggttatttgccacaagcaaccacaatctacgccacaatatcacaagggataattgacacaagccacagaatctttgcacacatgatacagctggttttcggatctcgcccaccttcaatttcacgtggcgttattctcaacgttgttttgtgtggtgaacacaatcgcctacctaaagtgatgtgtggacaggagacgttgaataaggtggacacgcacgggggccactgccacaacggctaatgtatggcctggtccgtgattgtagtctatagtgtcgcgttcgaagtaggtagctacgcagtgcacatgaactacccccggagaggcgctgacaatgacatctctactgtggattgtggagattgtggcgtagattgtggcgcaaattgtggcacaaatcgcgaagtgttatacagacgttatccccggataaaatcatcattagcgaccccgaaggtttctcaaacaccgtattgttcctctgtgactctttaactcagcgaggtattcgatttgcgtgccgtttaagcttagacaggatgttctgcatgtcaaccatgtcagactcgcagtccgcgtgatacgatacgtattgtagattctttttgcgctgaaaaaccactttacaaagcgagtttacagctatttccaagtactcccaacactgcggtgctgtccgttacgaataaaagcatgcctctaactggatgtcccttcaaccatgtccctccccccgtactatttgtcggtcatctcatcgccagtattcgagatctttcccccctactacaaaggtcacacaaatatctatagttttaataaccgaaagaaaaacctatccatgtcggtctcaacggcgaagctcctcttattgaagagttaaattcgccgaaatcacagcccagttaagaacgaaaggtccacaaaaagctataaaaagtcttaaaaaaatcaacgatactcgactcagttctttagagagaagattttacgtagcacttttcagtaaggttggagatcgaaacgataccagcagcagcgaaaacgaatcacattatttgattagggacaccctatcctacagcgattccaggactatcgttctagtccctccccaaacaagttcgccatagcgaacttcttgtcaatcaatacgcgtgggtgcttggcagctgctcacacaattaacaatccagagcgacattgtgttgcatattgagtttggatacctaggagatgtactggtatcattggcgctacaatcggcaactgtggcggcactaaatcgtttaattaaatcaggagttataataggcttgaaaatgacagatgtacctttgcgttttgctcggctttaggcgtggatgtactcgaaatagcgctaaatgaattttttaaatagcatttagactttccgtttctgcgcttgttttgagcggcccggcttgtggatgtgcacctgtagtacggcttgtgcaagcacagtattagctggcaattaaaaaattgagaataatacggaaaccaggttacataaagtgtatctgctcgtgtatacagcaagtgcttcttcgaaattgattcatgtgccgtacctgttgccggataggtcttccacggttgcgcgccaccagtgccagatcctcatcaaccttcagtctgcttcataagccgattcgccctcttcgggggcccgatgcttgttagaccgatggcgtagtcgccctgacgcgtacaggggaggcgctaggtacgacaggacatagttcagcagcgcggatgccgcagcgagggggggggcggcggaggtgcgcgcgcacttgagttgggcttgcgctcgaggggggcgaattcgaaatgaatcacgaccactgatgccaaacaaactaacgttttggttattttggtaaggcgtagttttcgatgaagggcaaatccgatattaacattttgccgccacttctatcattcataaacatgtcggccatccggctctattattgtggtaatagtcactctcctgttgtatttgagctacagcgacacgcgtcaatctcgagaaagcttctcagactgaaacgagagagatgctgttgtatctacaagccctgtatgtgttctacctttcctcaggagacgatgacgcagctgaggctgtgttagcggcatacctatcggtcgatacaaaccgatacctgtcgtttcgcctgggatccccccacgccaacaaccggttagctgcgctcatggctctctctagcaaagacttcaggcagctcacaagaatttctaagcgatcattctgcgctccacacgactacatatacgacaaccctatcttccattcaatgtcccagaacgcccggcacaagcaacaaccagtgtgctggcagttagaggttggcttatgccgacttggtgaaaatggaaacggcgccagcgttggacagctacaccgctacttcggagttgaccctacgcagagcgatcataagcgctactttgtagtctttgtcgatgatgcaagtcgttttgtttcgctgtacttggtcgatcatcgctccgaagtgtatgagaagtttgaagactattacgaacgggtcaaaacgcagttgcacgtgagaatgaagtcattgaggtcggataatgcgaaggagttcaaacgccttcaaagcacgtgcgaatcaaagtatggaatggagttcgatagcagcatcaaacacaatggagtcaccgagcgcatgattcgcactatcacggagaaaatgaggtgcatgttggtgcatttcgatctgccggaagcaatgtggggcgaggctgcgtcgacagctgcctactgcgtgaatgttcttcctagttccgctagaggaatggaggttccgtactctgtatggtatcggcagacaccagcatacgagcgactgaggacgtttggctgtgccgtgcttgcatacgtaggacaaagtcgagcggcgcaagatgcaggccaaggctaaggaggccgtatttgttggatattcgcgcgagaaacgtggttatcgcttattggatagcacaaccaacaaagcctttttcagtcacactgttgttttctacgagacgaaagctggtcgcatcttgactaattcaccctcgccagggatagcgagtgaagtttcgaccagtgactacctgggcggcgctggtgctgacaaaaatgatgttggacctatactggatgacatgtgtgagggtgatactggtggcgccgactccagtgatgttgaaggagatgcgcgtggttgtaggataggtgggcgtggtgaccgtccaggtggggcaacttctaccaatgcgagatatgtacggtgaggtggggcttccaaacgaagtcgagcaatgagtgaagctgccgaccctgatgtgccacggcagaagcgcgtgcgatttgttcggacaagtgattcgtctgaagatatgagtggagaccgagctgcgagcagcttgggcaaatctacgcaggcacgaggtgcaaagagcaaaaagcaaagacgaaaaggcagtgggcggcgcaaggcaccggctgtcatgacgaaagtcaacagtgagcgtgagcgaacaccaactacgatggagcagtccacttcggagcccagtgagatggagaccacgggaccggaggcatcggcgtcattaccaagtcaggccgcagatgcggagagtctaccaacctctgagtgcagagctttgcgagagtacgtggcaccagatggagctcgcgctgaggatcacccagtaacacggagtggtcgcgtgagcaagccttcgtcattgtttggcgactacgtttacgttgcgtatgagaacacaaattctaatatcgctgtgggtttacgttgcgtatgagaacacaaattctaatatcgctgtgggtttgtcgtcagtggaatggtcgaaagctcgtgaagagctgcagcggacgatggcaaaagaaaccgcacttgcatggtggcaggactactgctgcctgaccatgagtgtaattacggagccagatacaatgaaagatgccatggagagtgagcactgcctgcagtggcggactgcgtctgacgtagaatatgatgcattggtgcggaatggcacgtgggaacttgtccctcgaaagaagcacatgaaggtattgaagaaccggtgggtgtttcgtgtcaaatatctggcatctggagagatagatcgattcaaagcaagactcgttataaaagggtttatgcagatttatggagtcgattatctagaagtctacttgcctgtggtgcgtctcgaaacattgcgagtcctgttgacattggccgccgtctgggactatgaagtgcgccaaatggacgtcaccaccgcattcttgaacggaaagattgatgtagaggtctttatggagcagcccgagggatatgctgtgccggtcaaggaagactgggtttgccacttgttgaaaagcctgtatggcttgaaacaggctccacgagtgtgattccagcttctgaagtcatttttggaggagcaaggatttactatgttgaagtcggaggcttgcattgcagtcaaagtgattgattgtcaactagtgtttattcctctctacgtggacgatttgattcttttcgctcctacgatggatcttatcaaccagatgaagcaaatgtttcactcgcgcttcgagatgaaagatcttggagagcatcactacattttgggttgggagatcatccgaaaccgtgaagagaggacaattttcattggacaaagaaagtatggtgactctgtgttgcagagatttggtatggccgagtgcaatggatgcaagacaccaggcacgccaggcttgaagttgacgaaaacgatgtgtccaacggagcatgatgaacggaagcttatggagagcaagccgtaccggtccgtagttggaaacctgatgtatttgatgctgggaagtcgccccgacctggcgtatttagtccgtgagtgcagccagttcttggagaatcctggcttgacgcactggcgagccgcgaagcgtggccttcgctacctacgagaggcagtcgactatggatttcgtctaggagggcttgaatggactgagtaagtgcttgaccgacacttgcaggcatacgctgatgccgactttgccaatcgagtggacgatagaaaatcggtagcagggtacctggcaaagttctgtggaagtactatttcgtggagttgtcagaccgaaaagacagtggctcttcacactaccgaagccgagtgcatggctttgagcctacttgtacaagaagtgattcatctacggcaaatgctgaaagagttgacgatggtgcaaaaggcccctacagaagtatttgttgacaatgagagcaccaagaagttggcggagaatcctgcgatacaatcgtacgaagcatatcgatgtgcgacatcacttcgttcgagagcggtggatctgaaagagattgaagtcaagcgtggataatgttgcagacgctttcacgaaaaccctgtcaagaagcacgtttgagaaacacagagatgcaatgggggtactgccgcgagcagcgttcgacgcgtcgcaatgcaacgatggagaccactaggtggggctgttgaggattgatgtgtattgatcccaacgttggagtgcgagcgtgggtcgtttatcctgtgaaggcacagagtgctggaggttttcccacgtggtcgggctttcctatgaaaaaggttgaccaccacaaccggcagttaggaaagaaggactacagagagcaggaaagaactaacgggagctttgagctcattttttccacaaaacaccgactgcctcacaggtagcctttgctgcctgctcgtgactactcgttccttgagcttcctactctgtgagcaacacaaggtcgcttctgctttcctgattgtgtgggcttatcgacggaacaacgctgcccctctcgcaacgccccgcagtggacggcagtagttacttcgacaggaagaagaggtaagcaacggtaatgtgataatatctgcctgttgatctttctctaataggttcgtattcttcatgcaacatttgacgaacagatatttagtagcaatgcagttggtctgcgataatgacaagtgaatatttgctgtgtactgtggttgccctgggtcttgtgcggattcgagcgtctttaagcgcatgggtatctaccgttgtgcaagtaattttttctcaagtggagagtattttttttgcagcggggctgccgtagctttagcgtcagaggaaggcgtaacagactcacagagtctcagtttgaaatagaccgttcaaataccggaacgtacgagtccgtataccttacggactccaagagtcaacccttattgtgaaaaccgattagaatgtcttatcggattgttaatccgccgatttagtggcttaataagaccgacgacccccgatttgataaatccgacctcctaattagactggggtacctcgatttataatcaagattataacctaggacgacttgcagaatcagagcatatgagccggatttacatttgctaatcggccgattaagccagagccggctgatttgcttgctattcagacggaatgtccgatgtgcgaccggcattcgctccttgtaggctaaatcagccgccagacaacaatcgctgcagtcgctcttggctaggtagtcaaggctacaacactaacatcagaactaagcaggaaaagccgcacgctataatacatgtaactgagatatccaggcgacgcggtgttgccgatggacttggcgagtctccggccgaagtacattacagtacatcgaaattgctaggctgcacataattacgagaccgatgaacgatttatactccgattatgattgagacatccccgatttagcagcctctaaatcctctgtgagtgatgctttactggccaattcagcaggacaaactaatcggttttcacaataactcttaactgtgtgaatctcaaactgaatgtatttccctttattgcggcaaagacgcctacggtgtaaatgtatccggttcactatctagcatagcgaaccctagtcatatgcataatcagtggctctgaagccatgtactgattctcctactgatttaggttagacagtgtatacccacttcgaaacccttcgggtaactctcgtgtaaccccgttacagtatttactggccgactcggcgtatccttcgcttctcacggtgctgcccgcatccgatggccgacatccctgacaacactgagttaaaaaactattagcaaactctcgggtgcggaacgaacatgctattggagtgctgaagtcacggtggtcttcattacgtgaaatacgcaaccagctgaggtcaaaagctgaaatggattcgcttatcgactgggtactaggttgttgtgtattgcacaacatggttgctaagcttggtgatgcttggacgcgcatggtacttgatgatgatcttgtgacgaggcgatgcggtgttctctcccagaaaacagttataggccctccttgacagacctcaggctactagagctttggatccgtctcggctgacacagggtgtgtgttgtccagtacacgctgttggtcaggcgcatgatgtgtatcccttgggtagcggttcttttcaccaggaggttagtatcgaccccgtgcatcagacagctacgccgggctaacgctagaacaatccaacccaatagagttatacacgttatacaatcacacaaatacttctttgccctctcttctttctctaggcccaaggctaaggccaaaacacaagtcaactggtccaaatccaagacacttgatcaatcttggggacgcgcaccacctctcagagaggggaaacgatctaccctgtcgccaacttcttcagttcgacacaggcccaatagaccgcaaatatacaacaaagacggtctgcaatccgccaaatatacagatatggaatagatatgatcacttccaagccgaagcagtggatcacttacctaaagtactttgaattttgtcgtggagaacgaccttccaggctgtgaaagaagcacttgtgcccttcgaagcaaaacgaactctgtttggttaaagtcacatgcagacgaaatctttcctaagcgacccttcggagactgcgatctttctgcggagtgttggtctggccttgaagggtcgccaaactggatgccttctcggagttgttgggtacacctaggatcttggaagatgccatagtgaaaccaagtgttcttgggtttggagcctcggaacgcctcaagccgaggtcgttcttggaattttgtgggaggtaagtctgggaacgcgaagtctgggaatcgttattccgggaaaacaacggggaatctgagaagtgcctcagctcccaggttgtaagccagagtcgagttccgccgtacttagatatactggggaggatcgctcgcattccgttgcacttcatggaccgggatcaactcgcccacattgatctatcttccgggattcagcgtccattcgcagacattacccttgtttttataggagactccaaatcatccagtatcaccaaactccacatcattgggacttccccggttcaggtgcattcaccccaatttagggatcgacaccgcgtcacaatcttgacaacgactgggctgtttttccatcgcagctcggctatcaacacgttctgtttcccatttttccttctcaaaggccagtcggtcacgctcaatagcttgatgcgctacccaaaagagaaaagtagcacgcctggtgtccattgcttgttagatggaaataatagaggctttcagaagcacggtatttctaaaaatacgtagtgaaaaacacgtagcgctgatacgtgtttttgactacgggttttccgtagtggtcggctgttcagcgatacggaaaatcaaaaacccgtggcaaaactacgtagcgcggaattttccgagtgcacgcaacgttttaagctggaacctcggctcatcaaactttagctgcgagcgccgactttcggcgaacacgtcggcagcgcctacgcacacgcgccatcgctgggccaacgtagatgtacagtatagtgaagtaaagtaaaaattgttcagttttttaaattaatgccttcttactgttagccatgttcattccgtgcattcgatgaatctgttggtattgcatccaccatgaacacgtgtctcggttgtctgcagcgtcttcatcgaatttatctgcgttgagtgttgtaagtttcaatttgtaaagttttttgtggctccatgatagtttggtctactcgctttctggcgtatgatgctcgatacttccagcatgcctcgagttggcaccggaataggtagcaacgaaatcgacgcctcaccaagttcaagaaatggatgcatactttcttgggggttgcatgatggtttcctggtatttgtagctgtagtggtcccaatacggcgcgtcggctgtgatatcttcaaactccaggtaggtttggaaggcgctgttcgccccttgtcttgatttagggcggcggaggagcctaccggccgcccacgctggtccttggatgacaagtgggcagatggggtcttgacaggccgatagcagcagataacggagtaaacacacaagctaaggtcgccaacgaggagcactcggcctctaacagacggcacatgcgcgcacgaccaactatttgtcatccagggcccccacccaccctaacgaagaagcttaggcatgctgccttacgtatatttcggtttgattaccccgtagcggacccccctctcacgggtttacgggatcgaaaaacacgtagcctcgcccgtgccaaaaatagatcggatcgctacgggtttttcgctacgggtttttgccaaaaacacgtgcttctgaaagcccctaatagcataccttcgagacgctcggattcacttgtccagcgttccctatcaaacgatagacgttgtttttcgactaaaatgtatagataaatggaattcgtcgtgcaaagtgaacgaaacaaaatctagaaatatttctatgctatttcgatacagtttctatcggcaagagtcgcagactcttgcactcttgcgcgcttacttgtactcggcaagtaacgatggaagctctcaatgctcgcgttgagcaagtgctgggaagtattgtgtgttctgttccaaatttccatgggccggccaatctccggggccactaggattggttataggcacccgtttaagtacgaagtggccttaacatgcggacacttggaccatatggtttgggcccggagattgggcaaatgacttgagttttgtatttagcgattggagcggggtctccaaaccgccgcgatttggaaattttgaccggaattcacaatatcacctctgacaacaccaagtacgtctatctacgagctttatctcgcttcatagagtggctctacgagaatacggaggctgatcgacggcaagtcctgtttactagtacgtttcgtgagctgggtgcaattaatggggagagtatcgcgcagtggttctctatcgtccctttacgaagccctgtcaatctaagtgtattaagtactatggagtgtatgcgttacttgactcgatggagcagcgtggtgtcaccggaaagtcgacttttggaaatgttcgctgggcgatagtgtacctttacactcagacagaaagtcctcggccgcatgacttcgatcctcaaatgaggcgctttttcaaggggctccaccacactgtgacaagagttgctcagagcagtaacgagcgcatctcggaagggaaggagccgttcagtttttcgatgtatcgatcggtggctaaagcaatgcttcaatctaccagaaaacaggatgcgttcggccacactttcttgctcgtttgttggaatctcatgtgccgcgccaaaagtactgaatcgatacggcacgctcgcctttcttggcgcgaggactccatcacgattactttcgctcatatgaaaaacgatcaagacggaagtcggcctcgcgatcccaggcatgtgtacgcaaatccaaccatgcccgaaatctgcccggtattaggacttggagtgtatttcgctgtttttggtttagctcgcgatggaaaacttttccctggtggtaataagtacagtcgatttctcaaagtattgaagtctgtgcttagtggagaactgatgcagcgaacgttagctgagtttggattaacggctgctgattttggtacgcactccgcgcgtaaaggtgctgatacctatgttagtagctgctctacttcgggtccgtcagcagcggctatttgccttcgggctggttggactcttccaggtgtccaggacaagtatgttcggtttgaagccgctggtgacatggtgtttggtcggtatcttgcgggccttccatttgattctccaaaatttgcagcgttacctccatttttcgatgtgcaaagtgatcaagaagctgacagactggaactacggcagcgcattgatgtcgccataaaagccatttttcccggtgttccagccagtctgcggatgatctgtcaatttggtctggcgtcaatgctgttccacaagtcgttcttgcagcagtcactgcctacgaatcatttgctgtttgctactccgctattcaacacaatgaagcgcaatttgagtggctgcggcgtcgtgtagtttgtcgaaactttcaagagcacgatcctatccgtccttcgggcattccgccacacgtggggataatggtggcgcttacagactacaaggagcaaattgatgggattaaagaaggactggctgttgattttgagaaagctctcaaacggcacattaacggatcagttatgaccatggaagcgatggagacagccttcgctgcggtattggcgcggtccaatttgatgcgaccaaatctacccgcaccagatccagaaggcgagcctgccgtgaatgctacggcagtgatgcacaccgagctttacacatggggtgaaggctttcatcgagtgccaagagagtttgtgctacccccaggaaccgttcgcgttgtgtggcagcaatggtgtgctgggcaaccgctactaaggcagctatcaaagcacgatatggcttcaaggctacaaaagatccggcttgcagagcttcagcggctgatgcgcttggttgaagcacttctgacgagtgatgaggtcctgcgagcgcacagctctctcgattcggctggccttctttttgagcaagtaaagaatcgtttaccgttctcatcgacatcgagtaaaggaagagcgcgtagacttgaccaactatcgtggagaaatctcgcccgtgagcatgcaaggcacagctccagctagacaagctaccattacgtaggtgagtagcggtaagcttacacaatacacatttacttcgaagtagtagtgtttctactttcacactgtgtaccaaatgtgcggcacaatatgcttcgtgcaaactgcacgatgaattccactacatcttgcattatggacagtttcatttgatttttgtatagctggcatttttgcattcgtggaattcgccggtcaatttgcaccccgaattctatacaaagtggcagattcgcacggcgatttccgtagaagtaaacattatactgggaacacccgaagaaggagggggtggacagctcccaacggattaattggacgcgtaagcgtaacctggcgcaaccttcgtgcaacaccagccagaaggatgtcgaccgagcaggttcaacggcaactttcaccaagacatactgaggcaggaaatgcacgtcaacagacccatgcaccagcttcagaaagtgaactgcggcacgcgcgatattcatgggtgtggcccctgcggggccaccccttgaatcacgcgggctacagtcatcacggcaattagcaccggtaccagcaccagcattttattccacaggtgttcccagccaagtcgaagacgatctagttagtagagtcaaggagatatttttatttttactttttgcggttaccgccgatagcgctcggggcgagcactgcatcgaaccccgctgaccgggcccctcaggtacccggcggctacggctccgtcctaatttcctacaacatgtatcctaaatatgtatctgatcaggaccttctcgtactgatgttctcgctctaccgtgggtcacgcatgagcttgcccttgctcctccattgttgtcccacgaggatcgtcgtccttctcagctagggccgcctcctgtcgtcttatctgccaattctcaagccacctctcggcccgctcacgacgtaccgatatatggcgagtcagtacggtgtcaaatcccatacctgcgcgggtgtgctggcgccgacttctccgaatgtcggcattaacatcgtccagtagcgtgccttcgtctcttgcctgtattacccgtacattttcctggcatgttgtcttccagtgcagtctattggacatccagatactgcgtaggacgccaagatgcagtctcgtgccactggcagaagtgaccatgaggtattgagcccatcgcacggttgccggagtagccgatggccacgtcttccagccgcatggagccgagtatacctccggaaactcattttgtagccagcgacggttttccagcagaacggggtccgccccagttgtggctagtgcagagtttcatgtaacaagtggctgacggggaccgtattcgggcaagtcctcactcgtgtactcgatgataagccagcctgtagagagaccacactgtaatgcagaccaccattccgatgcccagcagtgctgctgtgcatgagttatgtgtggggtaataataccgatccacactggagaggggttcttggctgtgatattccgacgttcggtggaagaggtttagcttacctcctcgttcgaagtgtattcaccgggatacagacaaaccactcgattcccatctcagaggccgctcgatgtgccggtgaggtatcatagcacgcgacccacaatgtttttctctcatctctgcatccgttgtattcggcgcgaatagagtcccatcggctttcgtccgctggtataaacgtgtcatcgatccacaatgcagcttgatgagcaggtggctccggtttcagtaacgctgcaccgtatttccgtttcctctctcctgcatgaagaccatgtggggctagagctgcttcatttttcgattagtgaggctagcctctgcgaagtttgcaccgcacgccaagcggaggcagcccccagggagtggtgtggtgggtgaaaatatcctgagcgcgacctagggcgcacctggtcttctcgctcgcgactcttcgcatctcggagcgaaagactcaatgaagcagcttactacgtgacctcctcgatggctactgcttgaaccgtgcacccagacttagattgccgttgatcagatcactgggacaagacggacaaaacaagcttcgaggaggtcgttcacagcatgtcctcgaggccttggccgcccaaattatcggatcttgtcggacatgcgttcactctcatggtaggcttgacttgttcgtgaacatggccttctatcgtcgaacccaaaaactacgtttccgatctctgttgcacgccgatggaaactgcacagtatcgcgggtctagcgttcccgattcccatagtcccgtcacctggcacgggtggtaggagtattgcgcaggcatccgtgtgccgctcgttggagttgcacaggtaagagacgacccgctggtcgcttcttgcaaaactgcatttccagggttagaaggtggctagcatccgatgcccatcgccactctcgtaccagcgagattacctgcgctgcgtgagcccataggttgggattgagttggaccagcacacgccatggacctatttccttatcatcacatgtccaccatgatcgagtttgtcggccgctttctttggcaacaaggtggcaccggcctggtatcatatactcctggtccggaatccagaggcgatgacacaggatctcgagttgtctccccacctcaacatacaggcttggcgttgcaacgcatccgtcctgacccactccatatcgatgagcttgtgtatccatccgcggctcactgcatatccgacagtgtggcccccactgggtgtgaatgcggtgtttcctgagattagtgtgtaagacattggtaatcgatctccaataaaaacgcttttgatagtcatcccacccgagtaacttagtcatattcacgtcagtatcgcacgccgtctgcctgtgttctccacgtgtgcccattgcttcaatccaggtgaacttccgtttttccgctgctagtttcgtcaagtagagtcaaggagaaagtggacaaacaaatctcaaatgtgaaatgcgtaccgactgccttcgtcttcgctgccatttctatagcacctgcaattgcatttctgggagcagttgtgctggggcttgatggtgaagcgttcagcgatggtagctcaagtgtacgagatgctggtgcagcttggcgcttgccgctggtggtgggcggtttggtgggatgttgctttcttttggagggtgttcgaggcggttccacgcggcgttcatgggcagcagtggcaggtttaggtaaaacatctccggcatcttcttcactcactgcggcagctttgttggtggcgctacttcccagcgaatggcgcgttcgaggggaaccttcggacgctggcaatagcgagtcatcggtgggcggagacaactgcgtaagcagcggagattctgtcaagtcttcggcgtggacgtcaagggcagctgggggctatacagcagcgctcgcgtcgctactcacagccccttcaacgtcgtcatcatcttctcccggcactgccgcctgcgtcgttgaagtagaatcgaatgtgctaaggggcgacacgttggctttactagtacttatttcggtgcaatatccaccctagactcctacgtctaccttttcgagccgcgccaccgcgctgccgtggacaggaaatactgtacatagtatatcgtaggaagaagtaagctacttcaagaaaaccagcacaaggcgaagatagagtcataaccccctatcccagcgcctcatttacgaccttcttagttccaattattgggaagcaacaaatgaatgctttgcattatttttaagatcgagtactggtctcgccagcagcacaaaatagcagtctcactcaccatgccatgttagtggtcactgagctaataatattcagacatgagaagagatatcaacagatagacttcgatgcatgctgtagttaatgctttaaagctacaggtggcaacaaatcacgcagttgctactttcaactacttgtttttgtagcaagcgattgagaggtgacgacgacgacccatgattgaatttgacctatgtcactgcaaggctcattctaaacattcccagattcgctgctgttctttttcaaaatttaagtgggaatcgagaacttctgagctgagaattttaacatacacatcgttttactgccgccgcaatcaccttcttgaatctgagcgtatctggttctgccttacttacatatgaaacaattggcgggaacccggggacccatcgggaccccggttcccccaaaactaccggtacacatgtatgagcaaatgcattgaagtgttggtctatgacctacatagaacgcagctaaagctcagtaggggaacggaaggttaattcaccttcgccctcgtcctgtgtctctccacgaaaatccaggcgcttgcctggtgcagcggtacagtgcttcccggtctcatcgctatcctcctgctcttgaaagataaacttggacatggtaaggtatgttatttgggtctattcagtaccggtggcatattttgagggtagtccttcatcgacagcacttaggtatgagggtttagcttgccccgagggtaccaatatggaggccaaaaattaaataaataattcgcgatttggtcggtatcatttgcgagaacccgggttcccgcaaattgtttcatatggggctgtgtattccgctgctccatacgcattgccaataagctggatatccatatttgcgcgccaaacagaaagcaaagaaggcgaatagttattaattgtagaacactcccttttcaatcgaatttgaattgacgggataccgtcggcggcagtgtctaagtgtatttctgtgcgattctgtaagtcttttggataaccaaatcgacattcgtttccagattttctgccggaggagcatatatgttgctgaacacgttgcacgactcgtgataaatcacaatcccattcacacgttctggtgttgggtggtctagcagatagaatatctaggttcgtcctttcttcggtcgtgcacgttgaacaggtacaacttctaagatcgttagaagttttcgacaaaacggatattacactgtcaacgtacgatgctagttgtgtgcgccccaattctgttttcgataacttaagtacgtccggtgcatatttaatccaaaggagcgcgtgtatatgaggggacccgcgctgctggaattccacacgccaaaagtaatcagaaatttctccaagcggtttggcacttccacaaagaacagtattaaaaaacgcgtcaaaccttctgttgaaatgccgggcagcaatgtccgggttttcaattagataccttcgtctctctcgactatttagtctccttgcttgttggagtgtgagcttggggttacaagctctgaaaaaatcaggccaaactgtatcagctgcgctcagggttagaaaaaacgtaggccaccgtgacggcagcactcgactgcctagcatactcatcagatcatctcttacgttagatcaatacaagccactaccgcgaacgccacgaaagtagggtttaagtgagtcgagcattttcatagctgcactaatgtcatttttgacaccttccgagcaaccctgtgcgggagttgagccatctgtattagtttcagagtgtggagagccaattctacgaacgagcccgtccatctgcctgcggtgtattaagttcaaacagaaaaaacttaaaattacagtgagtaacaaatcgcctatcatgccacttcataacatgtgcacaatattcagctaagtggtattcgtgagatcgctgttcgtactctttgccgtccgcatccaccaagccatgtaaccctccttctccattcgggaacaacgtaggaaaacagttctgcatcaacattttggtcgtatactcatttattggattcttcatatcacgcaactcgcccgttggataaatagttttaccagtggttttatttacaactttcccaattttttctgcttctgttagttcgtccaattgatcggcttctagctcaaacaattcctcgatttctaagtttcacttgagtgatgttgttgcacatgattaggaatggaaaatatatagctatttttccgggtagctttggatgaggactgtttagtctgagaacatgagtgctacttcttcttctgtaagcgcaatacttggcacagttcgtcgatgctcgctcgggcaagctcctctaagttttcctctgaatggtaacgttccggtagagtgggttatttgcaataagccactctaaggcactgcgaatgacatcgagtcggactttgataagcgacgtgccttgattgctcgtggatcgcaacagaaccaccgcacacttggatagcggccttgggagcgacaatacaacttcgcgcacatcattccagtagttgacggtgtttcccctcgtaaactcttgctggtcccgatacaaattaaagcaagtggtgaacgaaattccaaggccaaccaatcgagcctctgtgcgattcagaactgccagttctcgcggtagtggtccaatacgaaacccgctcgcacgacaaaacttgggcatctcattcttagtgagagatgtattgcagcgagagaatatccacgtgaaactcatgccactgctgtcttgctgcgtaatggcttctgctattgatcgcacacgccgttctcatttttcagtgcagagaagtactgattacttgaccattcgcgcagattttgaaagctcaccacagcatccgtaagaaagtatcgtcgatgcgtccaaagaatgctgaattgtcactaaaacatacgtgaatacaattccgactcagagaaccataagagaatagcatacccaccatggacatcggcggcttcgttgttttgctgacgatccccgtcagcaccacgcttgagtatcttatgcccacctggcgcgatttgagcgcttgcatttcgctttcgagtatcctcggcgcgttggatgcgggattcttgttcaagctgttcgaaagcttctaatgggtttgattgtactgccttcctctttttcttcttttttgcggcggtatcagcagtaatctgtgccaaatcttgttataacgcgctttgctgcttttggcgtgatatgatatttataggagactcagctcagcttgatccggttattccgtattctttgtctacgccgcttactcaaattcacaacccaatacagcaactaggtcgtgagatatgggataatattccgtatgtttcccgcttaagaaatcaaaacaggggtaaggcggacccagaatggtttgccgctctaagtcgccttcgtcgcaaatgcgtaacgcgagatgatggtgatttgtttaatacgaaaaacttcaaccccagactgggctcaaacggctaaacacatcgcatatctcaatgctgacgttgcgacagctaatcaagctagcttgcaagcaagctcttcacctattagggggtttcaaaatcaactgtctcgcatttcaaaatccgtcacatttgctgattccctgagaccaacacggttgcagacttcatctccagaaaccaagactggaagcacgacgagatgatggtgatttgtttaatacgaaaaacttcaaccccagactgggctcaaacggctaaacacatcgcatatctcaatgctgacgttgcgacagctaatcaagctagcttgcaagcatgctcttcacctattagggggtttcaaaatcaactgtctcgcatttcaaaatccgtcacatttgctgattccctgcactcggaggtgcaaatcaaatcaggcatgatccgtggctttgtggtcgtaggatttagaaatgcaatagagtcagtggccaattcacttcgcgaagatcatggtgaaagaacacctcaggaaggaagacttgctcgcgatcgtgttgtggctcgaacatcgccccaacttcgagaagtgctttggcgtgtcgaagcagacgtcggttggcaagaagccggcctccaaaagtgacgggttcagggagatggccgctgcgctgtagaaaagcagcaaaggacgcttcgatttgtcaagtcagaggatgaaagatcgcttccagacctacaaggctcgcttcatgaaggcgaaggagtacgaggcatcgacaggagccggcatcacgccagacgacgaagctgctggtgtgtacgcagaaactggagaatatgtgtccctggtactccaaaatggacgcactgttctactctactaagtccctaaatacgccaccagatcaagtacctgatgccttctctacgggcgcgtatgaacatcaacaaaaagaaaacaaaatacgctttgttaagattgatttaccgcacagcgcgtacactgcactgttcgttgtggttgcggtttgatctcaagtattcgccggacgataaaaagataacctgtagtggctcggggacacacaaagaacacaatacgtgggcgctggaacgcccaaagccaccaacgtatactacgatagcctgcttagttctctgtggtattctaccgtgaggacttgctcctcagaggtaaatcccaaactcctgcactctctacgcgagaggtacagaacccatggcaaccccatcgtcttacctgcccttgtccgggcagtccaggaagaggtcgagttgccatgtgaagcttgactaagagggtggggacgtagtccacatcccactacataaccatatcaactcaacgagcatgcacgcctcccccgcgtacactgctccatcttcagcgggctaatacggaacgcatgtaaccacgacggctaaaagaaagaaaaagtttttttatgatgcttgatcttatggcgctcaccattgctgacatgaatgttactagggcccaaagctgggcaagacgtgcgctttagtgagccctagtcgtgaccaacctcaatcgtagcaatctctagcagcttctggatcgaggagacagagcttaaaattgcgtgttgaatatacggcggcataaacagctcagcatcattcaggttgccggcccactcaataccaaacatgtcggcggtgtcgatgtacgatacttcgcctcgctgatctttccaaacctttgacaagtccagcgactttttttgtgttatccactgcacacttcatcatttctcgaagaggtgtctcgcaacgctgcaaatacttttggcgttcccagttcttgtccgattcgcgaggcatctcatacttcacgagctgttggtaggagtggcaggtgcggaaggcagcaagtaaagatcgcggatgcccaaacgttgtcttgcaaagatgttcagcaacatccttcacttggctttcatcaagtttaaactgctcctggacagtcttcacctgtttcttgtcccaataggttttcttgatgatctcttgaatctcaggcggtcgaaggaaacaaagactcagtaaataggttttcttgatgatctcttgaatctcaggcggtcgaaggaaacaaagactcagtcgtcgaaacgtaaaatagcttccactttggtacagcctggcactcgaagaaagatagtttaggaagggcgcgcgtcccacaaccaggaaaaataaatgtttcacacaaaacagcggcctcaaaaccacctggcagaattccaggaatcgatcttccttggcgggaacatcaagggtggggacatcaaaagccgaagcaatatcatcaatcacgatgaacaatggaccagcctcgatcgctaatttcatcaaaatatccacgtgatctgggtttgcttcaatcgaaccgagagcacggggtgtggtgccatagttttccacgaagaatgcgcgaatggatgtaacgaaactcccgcgagccttctccatgtcaaagctcatgtcttcacgcagtatatgctccagagaaaaattggcaacaatggtgtggctctgacgtataatgttcagaaagtcaccatctgtatccgatgctggtaaaccatcccattgccgtcggcaactccgaatgtattcccggccgaactgcgactttccgatcccagatatgttgtccagcaaaggaatcatccacacgtcgccgtaaccgcgctttgcacggttgtaattgcttttgtgaaggcgtaccagctctcgagtggcgcgatcacggtttacgaaatacaatgtgccttcatcaagactgtagactggatcctcctcctctttccatttccacttcgtaacaggatcactcttgcgccgtttcctcgcgacctcgtcaagttctcgctctgtctcctctcggaatcttgtgcgcgctgggacttctacgatgatcgcggtgctccttgtgagaccgaacagaccaagctgcgctgtctcctccaacgggttcctctcgtggtcgtacgcgtggagattgaagacatcaaccccatcgaggtaattgtcattgaacctcttcttcagagcaactagtagacgctcgacggtggcagtctccgggataggggccgagctaaggcgtgtgcctgggaaaagatcgccagtgcgggcgtccgtcagcttgaaccaaacctcaggcacctccacgataagcggctctgcataattctgcccaaacccattcagctcctccaaaagcgtctggtcttgccgcgccttcgcgttggcaaacactttaaggtcgggtgtgtcgagctctgtggggagtacagcttcggcagcaccgcgggcagcattcttgaacacggcaagcggggtatctggcgctagatccacatatcttagcgtggccacctggccaccttggcgatcaacgagctcgaaccacaccctgaccatgacaccgacttcgcttcaaattctaaagactgttcattcatattaagtacgagtgatgtattttctcaggtctctaattggatttgctgttgccttgcatcggattacggaggtcctacgttggagctccgtcttcataaagtgtacctttttggaaataaggaccgaatggccatgtgaagctggccattcgggccttcgtaggactaacgagtccttcgtaggactagatcagggcagtgcgcatgaaagcatatgtggcaattatgcatttgccagtggcaattatgcatttgccagtggcaaatgcatagtttggccgcactcgtacaggggtagactcaggcagcaccacaaccaggtcaccgtgctcagcgtggagctacgtacatgcgctacaggtacatagcggtactgaatgcgctcacttgtcggcctacctttgcaagccattcgctcagtttacattcagtttttgtttatgtatggttttactggccttgatactaagttttatgaggtcttacgtaggagcaaaagtactaacttttatgaggtcttacgtaggagcaaaagtcctacgtaggacctcaaatcagagggcgttttgccagaaaggcacaataggccctggtttctccgtcggtgtctgggtctggggataaaatgcaagcgagcctattggctaagctcaaatcttcgattttgccattgattgatgtctggtaatttatatagatgattttgtatttatagatagaggtagcatataaaaaagctgaaaatttacagtgtcactttttataattaatacccgagaaacttaataagttacctgtgtcgtcgccccctacggtcttgatgttgcgtgaaagcatcttgaatctctcaatcgccggtagctacccgtgagcgaacgttgaaaattggcaagctcgacacccgcaagaatgttatgctgcgttgccgataactagtgcacggtctagagagtgcttaacccggcttaaccgtcgcttttgcgagcatagccggcgaagttggcagcgatgtcagcatcgttgtctccaaagcagaagtacaagaaaatcaaggtggacaacattcagtgcgtgaaaaaaaaaatgacaagtgcaatttgtggacagctgctggattggggatcgtggtcctacgactacaactttgtagtcgtagtacaagacccccgctgagaagcaaggtgctcgaaactgaactgcagcaggaatactactccgggtactacgaaggtgaacccgtcgagttcttcaaggagtggcgctccaactccacgcagactcgcgatctgtgtggaacttgctggacgtgttcacgtacatgcgaccatcccgttcgaagtgtctagggccacgacacgttgctgagtctgctaagcatcctgctctgcgtgaacctcatgcaggcactgctagtgtcgtcgtacttcagcgtgctcatcttcacgttcgcgcggatgtttaaggtcgttgcgcgcttcctgttccagtacctgctgctgctcctgggcttttccgggggactcttcctgctctaccacggggcagggccctacacggacttcttcagcgccatgcggatcgtcttcctcaccaccttcggcgagctcaactacggcgacatctacagcttcgacgacagcgtcctggcgttcctgctgctgaccgcgtacgtcatcgtgatgatcgtcgtggccatgaacctgctggtcgcgcttatgacgtccgagtacgagaaggtccggacgcaggccaaggagctgtcgctgctggagctcgcgggcgcgctgcaccgctacgaggagtgggtccgctacggcgtcgtgcgcaagctctactcgacgcccaagggccaggagctcatcgacgtctgcgtgctgcacgtgtccgggtcgggtcagcagccacgcgcgggtcgcaacttcctgcggcgcgacttgacgtcgtccgcgtcgtccctctcgttcttaggaccaatgaacaagcagcgtagtaaggttgacgctatgaagctctcgctgatcagcaagaccaatggggtggacgaagcagagatggccagcatcacggaggccatcacgacgcaggtcatgaagcatgtgcacgaggaggtggaggcgctgcgcatgcaggtgacgacggagctgcaggacgcccgcgagctgctggagacgacgcagcagagcagcgctcgggagcggaaggatgtggcaagtaggctggatgaggtgttgaagttgctagaaggggggaggaggaaggggtcacctcgggccaacaggtagagtagttagttcacttcaacttggtcattgcattgcattgcagtgcaaatctgtattttaatattaaaatagatgagtacatcgacaagatacgcgtcattgctcgctgattggctggtctcgcttcaaccttgacctgagagcagccgcacacgtcccttgccattgcattgcattgcgcattttgcggcgtggagagcaagcgagcggatcgattaactgggtcaaggtcaagacgacaagatgcgtctgagtccgcgcgaagaggaccatttgatgctgcactcggccggcttcctggcccagaagcggctggcgaggggcctccgactcaactacacggagagcgtcgcgctgctggccacgcaggtccgagagagagagagagagagacgacctttagctgtccatatctttgtcgtgctcatacaatggcaattgtgctgctggcaggtgctggagttcatccgggacggcaagacggtggcggagctcatgaccctcggcgcgcagatgctcggaaggtacacaggggcttcagtgcaactgtaaggtgtgcatgtactgtgggactaacactgctgttgttattgtcgtaaacaatacagacgccaggtgatggagggcgtggcctccatcctggacgaggtgcaggtcgaaggcaccttcccggatggcaccaagctcgtgacgatccacaaccccatctccagcctggacggagatctgtcgctggctctgtacgggtcgttcctgcccgtgcccaagctcgaggtgttcggtcctgctgctacgacgcccgcggtggcgcctggagctctcatcactcaagactcggacattgtgttcaatgccggccgcaaggcgcgcgtgctgcagattaccaacctgtcggaccggcccattcaagtcggaagccactaccacctcatcgagaccaacccgtacctggagatggaccgcaagctcgcctacggacaccgtctgaacattgcatcgggcactgcggtgcgattcgagcccggagaccagaagacggtctcgattgtccccattgcaggaaacaaggtgatcacgggcggcaacaacctcgcaactggcgtggtggacgaatccaaggtggacgcgatcgtcaccaaggcggtggctgagggtttccaccacaaggagctggatctgagcaagctgccgagtagcgtgacccagccggactttggagtgtgcaagatgcccagaagtgtgtacgcgcagacatatggtcctacgacgggagacgtcgtacgacttggtgacatggagctgtatgttgccgtggagaaggatatgacggtgtatggagacgagtgcaagttcggtggtggcaaggttctgcgtgaaggcatgggccaggcgtcaggaaagacgtcagcgcaggtggtggatacgatcatcaccaacgctttggttgtggactacacgggcatctacaaggctgatgtgggtatcaaggacggtctcattgctggcattggtaagggcggcaaccctgacgtgatggagggcgtgatgccgaacctgattgtgggcgtgaacaccgaggtgatcgctggcgaaggcttgattctgactgctggaggcttcgacgcccacgtgcacttcatctgcccgcagctctgcactgaggcgctcgcgagtggattgactacgcttgttggtggaggtactggcccagctactggaacgaacgcgacgacgtgcactcctgggccgaaccacatgaagctgatgctgcaggcgacggactcgtccccgatgaacattggattgacgagcaagggtaacacatcgcttcctgaaggcctccaagacacgatcgatgctggcgctgtgggcatgaagctgcacgaagattgggggaccacaccggcggccatcgacaactgtcttcaagtagcagaggagaacgacgtgcaggtgacgatccacacagacacgttgaacgagtcttgctgcgtcgagcacaccatcaaggctttcaagggccgaacgatccacacctatcacagtgaaggtgctggtgggggccacgccccggatattgtaaccgtgtgtggtgagcccaacgtgcttccttcgtccactaacccaacgcgcccgtacacgcgcaacaccatcgacgagcacgtggatatgctcatggtgtgccaccatttggacaagaagatcgctgaggacgtggcgttcgctgagtcgcgtatccgtggtgagactattgcagccgaagacttgctgcacgacatgggggcgatcagtattatttcctcggactcgcaggctatggggcgtatcggtgaagtgatcacgcgcacctggcagactgcagacaagatgaagaaggagctgggtcttctacccgaagacgctgcatcgcagcacaagcgtgacaacttccgagtccgtcgctacgtggcgaagtacacaatcaaccccgctatcgctcacgggatgtcacacctcatcggctccgtggaggtgaacaagctcgctgacctttgcctttggaagccctgcttcttcggtagcaagccggagatagtgatcaagggcggggctattgcctacgcccagatgggcgacccgaacgcctcaattccgactccgcagcccgtgaagatgcgtcccatgttcggagccttgggtgcggcagttggaatgggctctattgccttcgttagcaagagttgcgtggacaagaagatcgcggcgtcgtatgaactgaagaagcgcattgaagcggttcgtcactgccgcggcgtcaccaagaaggacatgaagctgaacgacgccctgccaaagatcaaggtcgacccggagacgtacaaggtgcacgcggacgggaagctgctgacctgcggtccagcgtcgtcgctgcctctggcgcaaaggttcttcctgttctaggcttgaaggggggcgatatcggatactcgatgtgcttgataatgtacgtgtcatatgaatccagcttacttatctactgcattgtgctgttagcgttgtcgccatcttttggcgagtcgaaggaatccgccgagctcatggactggaacgatgcgagtggcatcgcaatatcgccagaggactcggttgttactgcggacgaagacgcagttgcaacaaggcgagcgtgagctccagcagctctccgctgctgaatttctcgagacgcaggcgtttccgaaccggacgagctcatggagaagagactgttacccgagccagaccgaatgctcgagaacggccggccattgcggcctaagaaggcgcgcttggcacgggtagcgccgcgagccagagccaccgcctcacccacgttgtgtgcctccgcgttctcgttgcgcccaaccaccttgatgtggcccgagtgcttcttcttgccgccgcgcgtgcgttgatccttgtgcacaaagttgaagccgaaccgcaggatcaacttgaccgtctgcatggccgtattgcggtccatctgcttctcgtcttgtgtgaggtaaatgtagggcaccagtccattgtgctccttcttggcatcgtttcgccgcggaccgaacttccagccttgctccatgcgcatctgcgcccagacctcgtgcgtgttctcagctagcagttcaatcacagaacgaaggtgcggaggcaccttcacatcgtcagtcgggattggcttcggctcgtaagtgccgccgggttccgtcgccgcggtgccaaactcgaatccgtcaaactgctcctcgttactcgatggaggctccaatacgtatccaagagccgtgatgaccttcaatgccgacatcgacgtgtcgcgatcgtactgcttgtcctgctcagtgagagcttcgtacggtacaagatctgggtggagcttcttgtcgttatcacgctgagtgccccaacgccagccttggtcaatccgtccaacagcccacacctcgtgcgcgttctgcgacagcagttcggccaggagattgatcgagtggggcaaccgaatacggcgcgtgtccaccggctgcggcgtgtacttgtagccttctaactcgcgcttgtccaaaggtgtgagcgccgatgggaaccgctccaggaatgtaataacttcctggaagatgcggtcctccagattcgggatgcgaagtcgacgcttgtgcaccttcttggcgatgaacatgcggaagttgcgcacgagttcatcgaatctgcaagaaatgccgcgaccgggggcagcgaagctttccttgataaggcgatcgacgtccgcatccgtcactagtcggtgcgtctgcttcttcttccgcttgaaggacaggagccgcttaatgtagccccagccaacgtacccagtgaagtagcggaaccaggtcgaccgcggcataatgcacatctcgttgccgtccagcaacgcgttaccattgtacagcacccggcaggcgcggatatggtttgctccaccgatattagggtgattgtggcgcagtccaaaaggtccttcaccactgcgactgcttccgtgcacgtcggtggcgctggtgttttcactgatccgcacacggaacccgtcagcgttgctacttccatcgtagtcgtcacttgggtatccagttggaagtcgtcgcttaaagcgggatgggatgtactcgtcttgatctcctagcacttccagtgtgatctggtccttcgtcagcgagccgtcatcgatttcaatcgacatgccacgtttcaaacgcttgaggatctccaccgtgttggccagagacgaagagataggcacatacgtaacagggaactcgacaagatcagcaaaggaatccgtggagtctgcgcgtgggcgtgcgagctcattgacgaactccatctcgacgcgcatggtgaaatccgggtcgttctgccgcattagatctccgcagaccatgataagatgcacacacgcgcggaatttccggcgtaatcgcttgcgctcagccataagatagtcgtagtccacaagcagcacgcgctggaagccacagagtacgagctgctccgtggtgtacatcgagttcgcatccttgagtgggggcattttcacgcgtacacgcagcccgttcatgtagatcttgaattgtttcgcaatatcgtactcgacgtccatgaactgaagcgagtcgcggaagtcctcctcatcctcgccatcctccttggtagcaaccgccaggttgcgcttgttttcttccagggtcttcttttcggtctgagccagcgagtagtactcgctcataatggcaatgaacatgttcacgcaaatgaggtagatcgagatcatgaagctgaagaagaagataccagccatggtagggttcgcgacgtagatctcctcgtagtcgaacgcacccagcagcatctggaagcagctcgtcagcgacaccgatagggaatggtactgctgcactgctgtgccgaaagtaaggaagcccatgacagcaaagccaaagaagatggtgaagaaaataatcacgaacgcgagcaagtcctttgcagcgaaacgaagcgtgcgccacagcagattcaagcgcgaattcaagcgcaaatacttgaacacgatggccacggacaccagtccaagcgcggcagcgtagttggtaaccgatcgtgaaagccacgtcagcggctcaatgtccacgtagcattctcgagccatctcctggtcgtgcgcagggcctgagcagttcatatcgccaacgcggtacagatcatcgcgcaagttatccgatctcacgatgaaaagtacccagtgggtgataaataccaccagcagtatgagctgtaacatatccaggagattccacaggctctgcacgtacttgcgtagcccaaagtttcgcacgtctgaaatctcacgatacaccagcagaacagtggcaatcaatagcacaatcacgagtgcgttagcctccagaaagtctcctgtatctctgtaactcgccagcatgcggaagctcttgatgcgacctgtgacctccatgtaatccgtgttgctcatctcgaacaatccctgcacgtgcgagaaaatgttgctgcgcgcgttgtagaacgcgaaggtcgatgacatgtaccgcgtgccatctcgaatgaagtcgctctgcatctgtgcgaccaaagcggtagctgcggtgtaattgtcacgcgggaggtacacgacgtatccaccgtggccgtagtccatctcgtggctcacgagtcccggcttgaacgtctcggagcgcagcaacttgctgagtccgctgctccactggtactgcgcacgaagcacgccgctgtcgttgccatacggctccttaatctcatgataactcgagtactccgggtagcaaacctcatccgtaaacatgacgaagtcgctgcggctcgacgtctggctgcagagcgctccaatcacgcgtcctgttcgcatctggatgctgccaatggggcggctattccgaatcgggggctcgtagaactggtagagcatggggccactcgcccactgccacatctcgccttcgttgccaatgtcgtagaagttcttggcgtacgtcgtgtcgggcagctgctcctggaagtacgtgccgtccagcgccgagttctgctcgtacgggaagtgcaccggcagcgtcagcagcgtggccatgatgacgcccaagaagcacaggtacaccacgagctccttgtagaacttgttgcgcttctcctgctcgagacacagctgcacgcgcttcatgtgcacgcgcatggtcgagtagtgcgcgatctgctgcttgagctgcctggccgccaccaactggtcgtgggtcttgggccttgtgctcacgctcatgcggctggcgctgcgctccgcgctggcctcctccagaccgcccagcgacttgtccgctgcatgctgagaccgtctccaccagcagcagaacgcccaccacctgccccgcctcttgctgtcgccggcgtcctgcgcgtagtctccgtgcacggccacgagctccgacttgcccgagctgcggctgggcgtcggaagcctcgaggcgtcctccatgagcgcgtaggaagcttccagcagcgccgcgctctcgtccgctggctggtcctgcagctgctgcgacgacggggccggaatgctgctacagtgtctcactcgtcgggaaccgttggcgcctggacctgacacaggtcgcgtgtggtgcggacctgcaggcgtttcctcgaatgaaagcagcaccgtggcaaacgagccagcggccatgccaggctagcgccacacaacttagccgctacgaaataaagtcggggcatatcgggtgctgccgccaccgtctgtcggccgacggataccttggtacaggtggtgccttgcggacagagcgcacttgacttggcttggccgccaagcatttcgtcgtccgagtgctaacagcttcgcgccatttggtagggctcatgatacacgctgaaaccctggctggctccaatggaccttggcgtcaccgaacggtggcaagtcgactcgatacatgaacacatctgggcgtgacgcagagccgacggcgctgcaagacgcgcgggcaacacgatcatcggcgcgaacgcagtcggcgcggtgccatcatctcagaaaatccaacgggtcaatggatatcgcggctgccggcagcgaccgcaatgatccatcgctggcaatgggcccttgaagcggaggaggtcactcttcactggtcgctgctgctgctgctgctgctgctgctgctactggcgctgctggtgcttcctgcgctcccgctctgccgcgaagaaaccgttgctgtccagcaggaagagcaggtcgcgcgcctcggaaatctgcagcacgctgtagaggaactcgaatcggcggtggaagtcctggtccagcagcgcgacgcggtctgcggacagctcgccatcgcccacggcgtcttgctgcagcacgtagtcggcgaactgccagcagcagcccagcaactcgtcgagcgccgacgccacggtcttcgtgtgcacgtagcagctcttgacgacgctcgccacgaaggtctcgtggacgcgcttggcgcggtcgaagtcgccggcggactcgatctgctccacgcactgcttgaatttgccctcgatcacgaacacctggaagtgcagctccagcgtgcgcacgacgaagctcatgcggatgcgcagtgcaccggcagcagcaaaggttgtactccctcttccggtggtggctttcgagcgcaaggtgctactcttccaggccaactcgagggcgtaggcgactcgcttgagccggaagcagaactggaacaggtggccgtacgaccgcagtaggtcgggtgtcacgagcaattgcagcggccagcgcacattgcaacgcaagttcagtgcgtgccacagctcgcgcggagtcactgcggtgttgttctccctcaagtgagtgccgctgccttctcgccagctcgtcttggctgagtacttgtccagactccagtctgtgagccgcaccaccgacgaaaacccgagacccatccaatactcgcccgtagcggcgtgcaaccggagcgcttgctggaggtcgaactgcgtctcgagcaacagcacgtcgttcacgacgacagctatcatcttcttgtacatgacctgctttgaagacgtcattgtgacttcttgtcgggcgtactggatacgaactcgaagcgatgggttgttcccgtcaaccatcgggatctcagcgaccggcgaagactgcactccactctcacccacacacgacggctttacttgagccattacgcgcattccgttcatatttcctgggagatgctcgattgcaaggtcgatactcacgtagaacgcgcgtggatcatctagctcaaatgacccgttcactaacgtggctggtcccaacggcccttcgttccggagtagaagagctgcacggtggctcccgcgccaaaacgcgctctgttcccattgcagcgaaaactcggatgaaaacgagttgccgtccatctgcgcatgccgccaccacacagatccgctctcttccactccaggttcgcctcgtccgtgagtctgtcctgctgaggaggaatccattgccagaaacttgccattgggaccgcgcgatacgttggacaggagcaaaccatccgtcgatgggaagcctttcaacgcaaacgtttggagcgggagctgatgcacacgaaggcaaaacattacacagtcagttcgtcgaactccgcaatgtatgatattcaacttacctgcagctcgaagtcgcgtccccacggttcgtcttccggtattaaatcacgcacaatctctcgccaggcgccgtggttcacgtcctcttccgactttgatgtcggcctcattaacatcatgtcgaaactccgctcaatgaacgtctggaaaacttcaccgcgtgacagcaggaagaaccccttcagcacgtgcaggtatccaacaaagtccgacttgaccacgacctcctcatgcaaccgacccgcaacatgccggcgcactttctccacctcgtgctcgactgccacgacatcaaacactggtcgcctcgccaacgccgagatcgccgtcacgacgtcctgcacctccctgggcgagaactggttggctcgagtcaggatatgcaccgccttgccaatcacaaacacactctcggccacagaagtcgggaagtaatccagcggcaccgcctccaagtccatcgcgaactgctgatgccacagcaccgccgcctcactcgtgtcctgcattaatgctccacccgacgcatcttcgtgcttcttgacgaaaaactcctggtacgggtccacaatctcgccgtacaccatccacgccagcacctgcttgaacagcaccctacatatcccaaaaatcccagtcaaaacccccaacaagctcaacaaataagtaacaccttccagcccagtcaataacccaccgatgacaggcgtacagcagttcctgcattgctctgcccactctagggaacccagagcttgtgctctggtacagtacactcagcaactttgctcctttgatgcagctgccgtcctgctgcgtctctgtgagcctgtgcaccagcgcgcagacctcgggcagcacctccacgaactcctcgagctcgaacacgaggttggacacggggaagacggcgctggcccgcagcgtcttggcctccagcgccacgacagcgtccgcgtagcgctgcagcagccgctccacgccctgcgccagcgcgtgcaggaagacgccgggcagcgtcggcgcctggcgcacgaagcgctcgagcgtccagcacgcgaagcccaggcgcagcaggcggtccagcacgctgcgctgcgcctgcgacaggaaggtcgcctccttgcgcacgaagaagccgtcggcgcggcgctccaccacgtcgcccgtgtggcccagcagcgccaggaacagctcgtggtgcatagtggacttgcagtaatggggatggcttcaagattgatactttgttcggattggcggaaaagccgaatatccggataacagattttatccggaccaacaagatagctcccccttggatccagagagctttaggcaggaagaagcgaacgaccatgtccaggtgagctgttcttgccgacgttgatacctgcgcccacgctgcctgtaccaccgcgcgcgtaccatgtataccttgctaaggcactgacgtatattctgcgtggttctgtggcccctgtgacccgcaagatacgaccgcgccatcaccgtcttctcgcccgacggacacctgttccaggtcgaatacgccatggaggccgtcaagaaggcacgtgtatactttatcgagcgcatatagtatacgtagtgatggtggcttactgatgcgttactatctggctgcagggcgctgtggtcgtgggcgtgcgcggcaagaacgccgtggtgctggccgtggagcgcaaggagacggccaagctgcaggacccgcgcacggtgcgcaagatctgcaaggtggacgaccacatctccatcgccttcgccggtctgacggccgacgcgcgcgtgctggtgaacaaggcgcgcctcgagtgccagagctaccgcctcacggtcgaggacgcgccgtccgtcgagtacgtggcgcgctacatcgcgcgcgtccagcagaagtacacgcagcgcggcggcgtgcgaccgttcggtatctcgatgctcatcgccggctgcgacgaccagggcgtgccccagctgtaccagacggacccgtcgggcacgttctcggcctggaaggccaacgccacgggccgcaactcgaccaacatccgcgagttcctcgagaagaactacgtggagaacgccacggaggaggaggccgtgagcctcgccatcaaggccctgctggaggtcgtcgagtccggcagcaagaacattgagatcgtggtggtgcgaacgggcggcaaggtttcggtacgtcaccttctacctgctggaagatactactgtttaactcttaagtgtagatgactggcaaatgctgacattgttttctgttgattgcagccgcttgcggacgagaaggtgaacgagctctgcgatcagattgaagccgaaaaggaggcggctcgccaggccagcggcgagagcaagtcttcggcttagatcaaatgagtggaggaaggcagcgcaccgaatgcgttgaaagtggataagtcaagaacccataagctgctactcgaggcgtctaggccaggcagcataatcaaccagtgtgcggttgctacgcatcgacttttcatgacttgcaatggactaagatggatagtaattgacccaaggtcgtgtactcattttatttttcgaagatgccaggtaccaagctggtggcgtatattatcgtcggcaacgggcttatcttcgccgtgaggatcgagggtgacgcaagggttagtgacctcataaaagcgatcaaggaaacgtgtccgtcgaccatcacttgcgaggctgcagcagtgacgctatatctcgctaggaagggcaacaatcgttggctgaaagaaaaggaccccgatgcgaagaagttggcggcaggcgagattccttcggcaatctacgacattattgcgggagacgagtaccagctgcaagcagatgaccgagtcagcaacaccgccttcgatttcccagaagtagaagacgaagaggttgaagacgatgttatccacgttcttgtggttcttccgggactaacagatcgcggcactgcgaccgagccgcatcctattcgcaagaaaagatgggacgagctcaacgtaggtcttaatcgaaatcgagtcgttgaagatgaggccacggcaagtttcgactccgatacgctagcctgcatcagcagagttatgggatggttttggtacgagcagccacggaagcgcattggtgatgaggacaagctccgtgtcttgcacgggtatttgagtattctgaccaaagtgctggagattagtggggatggaaggcgacggcatttaatcttccctgtgcttgcctgcgtctgcgctcttttcggtgaaaaggcccgactcctcgagaaacaaactgttatcggtaatcgtgtccacggagaagcacacttcgacttcgtgctcgaatatggcgggacaaatgtctacattatcgcaccggaacgaagtgattttgagcagggcgtcgatcaagcttgcgttggggccgaagttttagcagatgtcaatggcttgaagaaagtttacagtatcgtgacggatttcgtggaatggtattttcttcgaagtctggacaagaaaatcgagcgaaaccgggtggtaatgttgcatgtggtgaatggtactcctacgtacgagtcggtgaaatatgttgctgagagggtttactgcatgctgtcagacgacagctagtcttactcataggacctcgtgtagctgcggagagcaatttaatacaaagcctttctttttcttactttcgattcacatgaagtttctgtcttgaaccgcaacatgaaatgctgctcctcgaggttgctacacgaacttttcatttggcagcgaatgctgaagagtttgcaattgatgacaggaaattgggctgacagctcgtcgatcatcacttgcgaggctccagctatgacgctgtatcggcaccgacgggcatggactcgcgggtagtacgtccgcgagtggtaactcgacgaagcgtcagtcgattcctgttgatgaagctatcaaaaagcacaacatattagcagtagttccatcaaggcaaggactctcatgtacgcacgcaccggccacaccagcacagcgctgcattttcactcttgtcctcgaaaaacgaaggtaccaattcctgcgccatggagactatcatagcgcgcgtcacgctgaagccctggcgctgcttggccttgatttgccggagtaatttgtcttcaaacggctgtgacttggagcggcggccgcttcccccaagagtcaacgaccctggttgctccgtctcgcgcagctcgtcgattcgcttggcccacgatagtatcgtggcataatggtggccaacacctttggcatattcacgagccgataccccagaagggcgcgcgagatatccttcagcaatcttcaacctaaagcggttcgtgctctgcgagggaatgcgctctcgtggcatttttttgtaaaatgacaacattcctagtgctgtgattggctcactaccactcatttttaccaaatgaaaagtacaaggatagtcggaaagatcggaacactctctaactctcaagttcggtaaagtaccggtatcacgctaatcaaaatttagacaccttgaggtgaatgaaagattcatgctctttcgtaagacgacagagagcctaccgtaatacaaagcgtcttacgttttgcaatcaacgcattttggctacatcttggtattagtatatcagtggctacattgtattttgtccgtcaaaacgtaagacagtttgtcggacaacaatttgcaccatgcgattggccaaaactttctgcacgaaagagggtagtgtcgttgcgtgcgttcctccgttgagcatgtaggaacccgaggacaaccgctttgccgtttttgaattgctcgtgccacctacagtcgacccgacgaaataaggcgctcacaagcacgaacatgtagtcggtagtgcggccctactgccgactacaatgtacacgcttgtttgagaatggttaagaaataaattcacccgaaccattagcccagcttgacaaacaaaacgttcagggctttatagtgaattctagttaatgcataaccaaatagagcccctcttcctccggtagtgcggcccacgacccctgtcgtgtcctctgaggacgcctccgagcgaaacaatgcacgacgagcgcgcacacatgctccgcaccgaggcgttgtcggaggacgcgagggagtagacattcaatacattatgggatcttaccaaagtcatgaaatgaactgttttgtagtagcaacaaggcagcgtcagccagtcttggtattggtatttgtatttgttgcggtttgcttggctgccttactcccggaggcgcacactgctgcagctccacctacgtcggtagtggacacctccgacctcacccgcggccacgtgtaggcaagctgttggtggtgtcgcaaacgacgtgagggcctctaagagtcaaatgagcggcgattcttctcgggaatacatgaaaaatgccaaagctaatgtaattgatcagcccgactgaaggcgcttaccagtttgctcggcctgctactgtagtactaggaaatctaaacgatctaagctcgccgtagtgttttaaatatgtagagggagtttgttggtgtcgcagcgctcctccgcgcagttctatcgaaccaccaatcattactaccactactatgctgcgcccgatattaatcaggatacgaagtgcaacgaaatgcaacgaaatgcatcaaaaagagtagcgaagaggaacgcgggccttcctagcagagcctctgcgcctggcagtgccaacagaattggcaagtcgtactattcgccaatcaaatcactagatttgatttgtcgtcaaactgtcttacgaatgctcgacacaagtaattgactgctgcacgatatcatgagtgcttgtgtgtattatctgtgttgttcaccacccggccgtgctgcttgcttgctccgcttttcaacttcaaccgtttacacttttccgccgaagctccagcagctaacgaccgacaaacaccctccagcatctatccaaccacagtcaaagtactaaacaaaaagcagtggaagagctcacgcagctagcgtcgggtgatgatttagttcatctcgcgctcgtagacggcccagcggcggttgtgctcctggcccttgcccggacccacgttcatgtccgtgcagccagcgtcggcacagccgcacgagtgcgagttcgagtccttgcatgcgcgcatgcagccctcgtcgttgccgtccatgtccgcttcggtcacggggagcttgttgaaggcaaacgcgtggccctcaccggcgacacgggcgatagcgaagtagcgcttgctcttctccttggcgtggtgcagagcaaggttgaagttggcgccgctgggaccgccggcgtacacgcggtcgttgcccagcatgtcctcgcccgtcgtgcagcccaggaagcgggtcttctccttcgagatatccttctcctcagctgcagcctcggacagacgcgccttcttgacggcagtcgtgggctcgacgttgggctgcttcttcaccttgaagatacgcacgatccagtgctcggacgtgaacgcctcctccaggtgcgtaagcttgatgttcttcacacccacctccgtgttacgagcacggtcgaagccaggaggacgctggtagtccgtcatcacctcgccgaagcggtagtagcacagcttgtaggccaggcagttgtgcagcaccttcgagccacccggacccacgtcgaagctgcccgcggccgagtagtaatcgcgctcggacggcatgtcgtcggggtacacaccggagccgatacgcacaggccagaggaacttgttaatgtcgtccgagctgtagccagtcacaccgccgaagatgactaggacgtagtccacgtccagactctgcaggatcgggtacgcgtcctcctccgacgaggccagagcacggccaaccgtagcaatgtgcgtgttgttccacgtgttgttgtccacgatgaccgtgcggttagccatggccgacatttggtagccgtagtcccaccacgacatgatcttggcgttggcgtcggtgttctgacgcagccagaagtacgcctcacggtagtcgtcgaagttcacgcgctcacccgtgcgggtgcggccagcctcaatcacaatactcggcgacgagtaggccatcgaggacacgtacgtagcgtggaacgtgtagctcagcatcataagcagtaggccgcccacaacacccagagcgaggagcttgggcacaggctgcacgccgtccttctgcacaacgaacgtcgacggacgggccaggacgcccatgaacttgcgaagcgtggaggaaatacccacggcgccaaggatgcaggcaatgggggccagcgtaagcataagacgcaccatgacaccggcgaagtaccaggcaaccgtgccgtacaggatgacgaaaatgccgccgtccgtcaggttctggaacaggaagtagagacccacgggcgcgaagggcaccagcacgtgcaggtcgaagaagtaggacgtccaggtcgtgggctggtgctcactcacagaggcaataatagggatgtacttggacgcgtaggtcgggtccagcagggtcagactacgacccgtccactgcactttgcccatcagctgcagcaccaccagagcgagcgcaacgcccgagaccagcagaccggcacccacgagtaccaggcggcggaacgacgcagccgaaatgtagttacgcagccagttgacgaagcagtacacctgcagcagcacgaagacgccgtgcgagccggcgcactcggcctgcttgatgacgttgaagccgacgaaaggcacctgcatggccatgaggctgcccagcgcgtagaacgtcgagtaggcaatgtacaggcgcggggtgtatcggccagcgaagatcatcaccagcacgtagatcgggatcatgttgatgatgaacacgtagccgccccaagccgccaccatgtagaagtacgccagcgcgcaggcagccgaccagaacatggatcccgtgtgcacggccttgatccagaggtagaagacgaagatcagcgcgaaaatggcgacaccctcgttatcgtacgagccgccgaccgagcgagagatgtacgacggcacaatgcccgcgaaggcggcggccaggaggccggcgctcgagcgcttggtcacctccttggtcagcaggtagctggcgatcgccgtgttggcagcgaacagcggcgccaggaacacgcacgtgttgcgcacgttgatggaaatgttgaacaggttcagcacccagtacacgagcgccgccgtgtacatgaggccggggtagatggtgccgccgatgatacgacccagcgggtaccacgcgcggtcatcgaaccagtccaggaactcgaggaaaccctcggacgccaggtacttggtcgtgcggaagttgaagtacgggtcgaactcgtggatcacctacaataaatacaataaaatattagtatcagactgcaattgcagcaacattgacacggatgtatcaatggcatttttcttttacttacggactcgtagcgcacgacggcgaagaggcggatggagaaggacatgaggcagatcatggccaggatggcgtacttggccacgggggccagcgccgtctcgtcgtcctcggcgtcgcgcgggtcgtccaggtccacgccgaacacgaggcggctcgagtcgacgggcttggcggcggcggcggccgggacctgggccacgttgggagtctcattctcggagtcgtccgaggcggaggcggccgccttcttggacttgggcttgggcgccatggcgagagggtgtgcactcactgcctttggctctggctgtgacggcgctcccggttttgggctgctcggcacgttgcacgtggcatcaaagcagctcgcgacggtgccaagatctgtgcagcatttcaaggaggacgtaattacgacaaagggctttttacgaaaggctttttacgatcgtgggattagagcgcaagtcggagataagggcggggtgtgatcgaatacaaagaaaaagattaaggttgaagctgctgtttaacagttcaacagcattgcgccgaaatggcaacaggcccgtgtgaagctgctgcatcgagttcaacggtgttgtgaagctgtttgtggttctacaaagccgctttctgtttataacagacaaggagcgaccgaaatatcactctttgttggcgtgaatgcaatggttcatgctcgtcaggaagctaaatagtttttgtccagcttatatgcgatgttaagatatttagtcgctttgaagcttcaccgaaggtctagtgattaattttatatgatggtcggcattatcttgaggcattaaaacgagcaagacgcaaaatacttgccaaattattgctagcgtcataaccaatgcagctcgggctcccattgagaccgtcatgagcatactgtacaactttggcacatggaataacaaagacatatcattaacgatgaatacctcgctctccgtgctgcagcattccttgttagcgcgttccccatggtgtccgcgttgcatcctttcagcagtgccgaatttaaggttctgtacacaaaccaatgttctatacacaatctcaaagcgcagcccgtgatttgcccaaaatcggtttccagtgcacggattgggctaaaatcgtacctatagatgggtggttcccggagcaatggttggtgtgcgaggctggtttggtaatttcgagcagccgccagcgccgagcgcccaaggccttcatttgctactgtccaaagctatccaagaagaaggtaagcctctcgcgcctccctctatacgaagcagcgcaggcaggcaggcagcgcgcacaggcagggctggagacggggactagggatggagcagcagcacaacagcgcacaatggcaactacagggcagcttcgagcagctacaggacacgcagcagcgtcttagcacaggacccctcaacaacagcagtgaccaccctctccatcttgacatcgacgtcctgcccacctgagcgcccacccgcctgccagctagcgacacggacaatatcgagatattgacgcagtgactgacgcgcgtgtgtgttgttgctgccggcagtctgcaaccatggctaacctcacgtactcccacccccgcaactacggcaaggactcgcgccactgccgcgtgtgcaagaccacccgtggtctgatccgcaagtaccacctgaacatgtgccgtcgctgcttccgcgagcgcgccacggacattggcttcgtcaaggtaaattcagatcctgaacagctcactccctagagactggagactcacgacgtggtgctttgtgtgtgtgaatcgcagtaccggtaaattattattggtcggccaaccgctcgctggacgactcggggacgcgcgcgtgatcagtcgcgctcgctgacgctgacgcctgcgactgcgcgtgcaatggaaagaggttgtttagatacgccgaaggacacgtcattttagttcgttccgatgaactggaggagggagaagcgtcgcgacgtctcggcgtcgagaatgctcgccctcgtcacccgggtaatcgaatgaagctaaattgcaaaaaagactcctccccacgctacgagtctgcgtcgtcgatccgtcacttcgtttaacacacaggaaacagcaaccaccgcgactcagcaacaggaacagcaacttggctccagacccctcttcacaccgagacaagtgcccaccagagtccactgaccgcagcaaagtgcagccatttccataaagatctgcatccagcatactggtggtcaagtcccttattagcagtccccgtcttcatctactgtagtaaaattcaacctcaatttccagcccacctactccatggtcatcaccaacgctaagatcgcgtgcctcttgcccgaaattaactggagccttctctctgccttcgtccacatcagaatggcttccttctgaggagcattctttcgacctacgaaacagcatactcagaagagctcaattcaaaaactattccttggatccaaagtttgaccagaccatatgcgcacgtctggcggcgcgggcgcctcgcgcaggcagccccgcgacgccacgccaggtcctttgcgtcctctaaccacgctgctactcaccctcgcgctcttgtgctcgctggccgcagcggaagcagcccccgcgtctccgcaatggcgtcagctggagagtcacgtgacggtgggcgccgacggcatcgcgacgtcgcgcggggctggacgccagcgcagtgacggactctccatcacgcgcagcactccggtggacatcggcaacgctccagacgcagtagtggacgaccaagccattaagttcacgccgcctcgagtcgagctcgggcggatggagacctgctcgccgcagaggtattacgtgggcgtggagaaccgcggccgagtgtctgtgagactcgatggagccgacttcactcatagtggattttcattggcaaccgacgtccgcggcattcgattggacccaggcgaccgattcaacctgcaattcgtatttctccccagtgaggtggaacccaatggagtggacgctcacttgagagtgctaacgacgtcgggactatttgcactgccgattagcagcccggaggttgcactcaatcgatacggagtgagcgctatcaaggcgtcgattcccgctggagttcgctttggacagtcgctgcagtttgtcaacccggcggattatacgattcggatcacggaagtttacgcgctggacagctttgtgcatattgaattgctcaacggtagcaactggatcggaccacggtggccgagggaagatgacgggaaggaggctagagaagtgcctggagaatacgacaaagaatttgactatgcaaggcgaaccgaccgtggcgcgtgggatatgcccgcgggtacgacgagtccgctgatgaaggtttcgctgctatcgaacacgcctggcgtgtatttcacccatattcacattgccgctggggaacatcgcctggtgatggttccagtgcacattactgtattgaagcctggaatccacattgaaccgaaggagctggacctgggagtcttgaccgatcttcacgaagacgaaccccgcgaagtatttttcactctgtataatgccggcgtgaaccctattgacgtattggaattgaaagttttagagagcaacctgatcgtgtcagctcaactgtggggaggaacgtcagtgattcctccacgaactcaagtgtatagcgcgctggctgttcagcttcgtgtggacaaagcaagggaaagcggcaactgcttcgcatccttgctgctgaagacaaacgcatcgagctcggagctgggacagcgcaaactgaaattgtacggacaagtggtaagaggcagcatgactttccagctcaatgaaacccgtgctggggtcgtttaccctctacaaaagttattttataaagatgaaggtgccggtgtcaatgataccgcagaacacaatggtactgagctaacgatagatgacgaagagacttctacggccaagttggtgtcaatggttggtgaaaatgcctcgatgggaataatggcgggcacgagtgccttccagaaacttcgtttgtggaatcgatttgaccgcccgatggaactgcaacgcgtctggatagactatccacgatcggaacaagatggatctcaagaggtagctgtgtacagatttaaacagagtgtggctcctgctggatcggcctggccaaagatttcacttcagatctctccggcgctacgaggcaagggacaccccttggcagcaaaggcgtatcctctcgtaattgagacaaatgtcacgcgccaccgcatcccgatctacgtgtaccacggattccttgccgttgattcaagcaggggccttcagaatcattccgtgtcgggctattacacttcaagttcttccgagatgaagtcattccaatcgtgtgtaaaggtaccggaagacggcagcgtgccgactacgtcaccgcgtatcgatggtggagaaggagttgcggacacccaagctgccaagttatgccgctcgatgttgttcgacttagaaaaagtcgcgtcacacaactcccgtactgaggcggtggaaattacgaatgaaaacccgattccagtcaccctcaaagttattagtgttccgttaaacgacacggtggatttgtcaatacacgacgtgcatggcgtagtcgaacggcgtgccaatttgcgggaagatcagctggaacgcccgagcagcagggattctgacgtcgtcgtggtgggtgatactgttgttcttcggcctcgccaccaaattgtgtttcatgtgaaagtccaagcgaaggatactcttggggagcttacagttccggtcatgtctatcgctactcctaccgaagtactacacttccatgctcggttacagagtgttcggggcacagttgagccaattacgccagctatcgtgttgccgtcaatgtttcccgggcgtacacaagttattcacttgaagtatcgcaacacgttcgagcacccggtgacccctctgatggccacgacaagcagctcgaacctgaaattgctatctattcgaaatgcaatcaccccaaagcaggttgagaacgtgctggatctgctgttttccccggcggccgactcgaaatgctctggcgcgctgtttctcgctgactgtctactcccaacgatggaggatcaaaccagtgaccagctttcgggttacggagagcttgtccatggacacgacttgattgccttgagtcgtcgcaatgcattttggagtgacgcactaggagatgaccacctgtcgacggttgaaacccgggtgcacttgcaaacagacatcatggatgatgttgccgaagttaccgtcaaagctcttctggagcgtcctctggttactgcactgtcagacgcccaggcacagtcagacaatgactcttcggtgatatttgagcgcaaggagtttgcgctgacggagcttttgcacttaagccacattttcgtgcgtgtgcgcaacccaagtaacgtgacgatttacatggagctgacgcgcgcagaagctgacgaaccactgttttattcctgcgacgaaggtttggaccacgtcaacgatatcgtggaaggtgacactactacggagatctcggcattgtgtctggacgagtggatggcagccgcgtcgaattctgtggcgctacagcgagaagttcaagtggatcttaacatacccccgttttactttcgaaggaagattatccaggtcggcgctggagaggaggctcaacttggtccaatctactacctgccttctaaagtccaagaagtaaccacagtggcgtttgtgcgcaacagtctttcgcacattgagcccgtgccattacttgctcgaagtggcaagggtacattagatcttgtggtggatgcagcagatagcagcacttcggacaagacccgctataccccccgccgactgattgctgagactggaggaagtgatgaccagctcgatttcgaaggaacactgagatttgatctaactcagcaagatgagttgactgattacactcgacacactgagattctcctgtcaaacactggcccatttggacttacgattcaaagtttgatggtggaaggagaagaagagatttcgtggctgccgtcgaaatggacatcaaaaaccgcttcaacagccagcgacttcgaggtctcttcggaatatctgcagtccgcaatgaacagtgaaggctctgctgtggtgcttcaacctggaaagactgcccgcctccaggtttcgttccgtgctagctgtttcgtgactaacgttgctagtcggctggtcgttgatactagcgacagtgtcaagcgtattcgcctggaaggcacgatttctactgaggctgctttctcgtgcctgcgttctccgatgtcaccctcgtatcggtatgcacttcgttcagtatggacgttcgcggtcctaatcgccgttatctccacactttgcgcactctgggcgttagcacgtgacgcatggacttccgacacgatcagcgaagcatctttcgctgtaggcactcaagacccgggtaaggtgggcagcgacgaattggtgacagcatggaacacggaggacgaaaggggtgcgaagcatgaaactctcgaagcaatcaaccgtctattggagggcatggaggaagcaacatttgccccaacagcccgcgtggtcacgccggcagtgacggcattattggagagacggcacaaaggagtgtgctcaatagttcagaaagaccccgcttctgaaatacctggggttcttgaaaccaccagcgaaccgaaagaagctcaacgcaatgctacatcgctaccggcagtcgcaactgacggaacgcagggtgacaagttggtggtgaagactgagcgaatctctgcgtctgacgcggcgtctacggcgacggaggcaagcttgcaagatgcccaagaagaggctgtggacgagggcgacgtcgcggagatcagtgcgctgctcgtatcaaccgaaccggtctccgagcctaatgtcactttgaacaagctgctcgatggcaacgacgaccacaataccaatgatctgtcgtcggattcaagcagctcagtttcgtctgaagacggctcagttgcgtcctcgcactcgactatcatacctccagaatccgaagagtcaagccttggtgcggattttcccaagctgttgtttgggtccccgaatggtggtgacgaggtgaagcctgcccctttgggacccgataaagctacacccaagttcaacggcacgccttcaccacaaaaggaggaagacccgttcgaggcgttcaagtcggtgtcggagcggtggcgtactcaagactggccggacaactttaccgatccatctccatcgtcattgtcaccgaaatttccgacctttgaagactggaacggcactttgtcgttcaacacgctggggcaaggtttggtggccggcaatcaacgcgacgagagcttgagttcaggcagccgcagcgagtcgagcagcttcatcggaacgagttcgggtctctatcttgacagtttttcggcgttcggaagttctgtagcagctccgacccccgcaccaaaagcgaccaccacaaaggctcctcccggatttacgcccgccgatgcgaaaccgttggagactcgagcagctttcgaacgacttcggagtggcagcggcacgaccagctctgctgcaatgaccagcacttccaacgaagtgtttggcggcagctcggtgtttgccggcaatctgccactgttcggtccggcgttgcccccaacaaaccacaaccatggaggcgccggtcgcatcggcagtcggacgtcgaaggggcttcatgctgcggactcaccacagaagacgtcggctggtattggtaataagcggactggatattaaagccgatacagacggatcctgaggtaacccaacgttgcactttaaggagctggggtagaatagcctacctcgagccactggatcataggctacagtgatgagttgcatgagtgtaccccaacgtcggaagacgccaacaatcctaggatcgccactttgtcaaaacctgcaaaggggcgcatcctggcacatcttaatctcctttgacggtggcttcgcggtagtctcgcactcgaaggcttacaagctgaaacacttggccgcgacggcgccaaagctgactgatacaacgacgacacggccgcatggggcacgagaaggtcgcgttagttgcgccccaatggcagggtggcgttgccgcggtcaagtgttcgacgtacaacagtcccggagcatatgactctgcggcggcgcttgctctctaaaacgctacatgtacgtgcaaaatactgtttgttttgaaaacagtacatactcgagtcaggcagtcgtgcaatggtggattccgcaggatgtcgccgagccaaacactttcggacacatggctgtcgatcagatgagcgacgcaacggctcgagactgcaatcgtgccgtgaaaccgggtgctgtacatgccgttgcagtgaccgttcctcttggctccagtatgtgacgctattttttagtacgtgctgaccaaaaaaacgttagtaaatctgtctatgctgtttgaacgcatcaataaatacgatatttataacttagtggtatctaatataaacggttgctgtttggaacttggtcattcacatacaaaaattctgatatcgtcgctccctaaatctgtcaaaacggatactggtccgtacattttgtctgactcccaaaagataggcaacatagaccgcccagttcaaccgcaacggctgacaggcaaaccacctggcaggcaaggcctctccctctgcacgcgctttttgtatggcacggagcccgtccacttcgcatggcgatggatttcggacagtccgtcactcgcggtctgctcctgtgcccgcattcccgtttctactgaagtcgttcccgtagagaaccaattctcctttcctgcaggaaggcagacttggtctcccccccccctttgaaacgctaataaggactgcattgaccagaagaagaagaacaggaagaatgatgcgggcggtgctcttcgcggccgcccaattgctactatggaggacggcggccgccgtggaggacgtcgaagtgaacatcatgtcgttcaacattcgcacgtcgcaggcctcgacggacgcaggctcgacctgctcgaactgggacgggatccgtaaggaaaacgtcatcagcaacatcaagacggtggccgcggacttcgtgggaacgcaggagacgtcggacgcgcagaaggcgtacctggacgagcagctcgcaggcacctactcggtcatcggagagagcacgggatcgttgaacggaaatgcaaacgaatggaacgcaatgtatttcaagcgcgatacttggtcgctcatcacgaacggcatgttctggttcggcacagatcccgacagcatgacttctgcgtggaacatgcaatattacagaacctgtgtgtggggccgcttcaagcacatcgccacgggggccacgatctgtgtgatgaacacgcactacgagacgccaggcaacgacgaggcccaggagaacgcctccaacatcatcctcgagcgcatcaagaccaactgtgacgcaggcgacaacctcatcgtggtaaccggagatttcaacgctctcaagagctactcggccatgcagatcatgttcaacaacaacatggaggacccgtcggacgagggcacgttctgcggcgatatgctgtcgtccacgtgctccgtcaagtacgacttcaccctgttccgcgcacagagcgaggaagcgtgccacctgaagtccgagatctcgcgcatcaattacgacggctgctactcgtccgaccacgccggtgtggttggatcgttctgcctgcagggttcttgctgttcgaacagctcgtcgtcaggctcaaacagctcgtacttccagagtgacagcgttgcgggtgagagtgacattgttggatcggtgcgggcgagcgatgtgtcgggcgccgacaagggcaagacacagaccgagtccgcttccagctcttcttccggtgcagctcagatgatctccacgtcttcggagggaggtggcagtgcctccactacggttggaattatcatgggctcgctcggtctcgtcggtctcgtcgctcttgtggccattcgccgcaagaagaagctggaagagcaggctcgtctcgagaaaatgtacgacccgaacaacagcggctacttccccggttcgactgcggccagtgcacttcccgacatggcggcgctatctcctctaccagaaggagacggcgaaaacgtccccagctctcctattcccgagctggcagcggttcctcggggtacgcgtatctcgacatcgtcttcagtgtcggcatctgactccgaggtggcacgacatgatgacgagcggagttcggagattcctcgagcgagccgagtgctcagtaccagctccagtaaccggtcatctactgctgtgatggaccacaacacctcagactcggagtattcgtccgcctatagcaactcggtcctcaacgacgagggcgagttcagcacgtccgtcatcagctacggcaactcgtccttctcgagctacgccgagtcgtacggcagctcgtccatcgctatgagcaaggtcaacttcagcgagatcttcacgcgcgactcggacgacagcgagttctcccactcgcagaccaagatctagtcagtcaagttttgtttcgtccgttcagtgctaaaactcaccactgccccaagcattggccatactcccgctcctaccgtagtaactagttagtttagtcgaagctagcctccatttaatatgcgcgggtttattcctgttgtcgttaacaacaacaatgaccgaaagttagtccgaagcgttgcaaaacatttcgccacgtggccaataccgatatactatggggttaaaactgcactatactagaaatgagagctaaacgttaagatgtctagcattttaagctaagctgctctctccgtgagccgcatcctcttctcctccagctgcttgtccaccgagttgagctgtagctccagtcgcgccttctgctgcaggagccactgcaggtgcgtctccatctcaagcgccttgtccgcccgcgtgtccttgatggcctgctgcacgcggtcgcgcttgctgtccgacttctggatgcggttgaaggcgcgctccaccagtttggacgcggcctcgagctccgactcggcctccacagcggcgcgcgagctgaagcagttcatgctcatggtgttcttgttgttgacttttgtagcgaactgaacgcagtcccgttgaatacaataacggattaaagaggtatgtagccatcgcagctaaagttgaagttattttggcggcttttcgcggatcaacatggcggcggagcgagagcctcaggactaccagtacgcgagcgagtcgctggaccagttcgccacgtacgaggactacttggactcgcaattgagcgagaccgacctgttctacctcgaggatgaagaactcgctcgtcagctggtagaactgggctatcgtggaagtggcgagacacttcggcgggacgactttgaagcgcggaagcgagctgaacgagagcgcaatgcacagaagacgagtgctccaaagccacttgcaagtgcggggaaagacctctcgcagtgcccgttcttggcagctttggcgagccgagaagatctcgtgcgcaacgggaagctgacggtgggcgcacaatttcgtgtatagttagttgctggagattttcttagcgctgttttgaatgtttttagtgtattatcttcattcgagacaagaacgtgaaggggcaggagattagcgggtacattgactacgcgctgcgtctaaagaacgagccgtttgaaccgtactttgagcgcaagaagaagctgctcccgaagtcgtcggacctgagctactacaactgggagacgcagacatccacttcgaactcgacaccgaacttccaggtgatcgctgatagcgagacgggtcttctattcaagaacaaacgcgataggaaggtagtgaacgtcgacccaaaggtgcgtttaattccttcgtgttgtgattttgtgggatgtgctctgatgtctatcgacgttcttggcttaggcaaaccctggtgacaactcgacacgaactgagatcaaaacgaaggaatacttgcaagttgtgatctacgatcacatgactcgccgcaagacctagagaggagtcaatcctacagggcaaagcgagttcacagtggagcgagaactaatcaatcaagcagatgatatctttccaaaaactagttgtgtatcgttgtctctattgtacatctcgattcgtgccccgaaaactcacttagagccaacgatatcagcgacgaagaagtgctcacccacttctacatccaactcaactgctaccgttgagatgtgtttgaactaagttgactactacaggagatgtagtccacgacggcatttacgcaatagcaccaataatgcgctccagcagcagcctgtatccgttctgtagaaggaactgctggaacggtcccgcttcgatggccttgaaaagtgtcagctgcacaggaacgatgatgtccgttcgcgggaactcgtcatagtcgtcgttgttcattgccatgcttcgacggcgattactttgtccagtctggtgcgcttttcggagctggtccagttcgccagggtgcacgacatgcaagatcgagaccgcctgaataatcctcttcagatggtcccactcgtcctgtgcagtccgccgatttgccatatttgcactggttacaaggccgttctcccgggccaggcagcttcgacggaacagctcgcactcaatccacgtgtccagcaaaccctggtaggtggtcgtaaagacaaagtcgcgaaaaagtttcagcgtgtcttctcgagagagtacgcgctccagcaacgaaggttctgccttgggcggcacataagcctcctgctcgcttcgcaaaacagcctgaagcagtcacagcaacaatacaaaattcaacagttagaggtgctgtcagcattcctttcggttcggacataaatccacgtacgtcttccgtaatccaaatctcagcttcatacaaccggtgattttctgagcacagtccgatttggacgtgcagcgcgtgaatccaagctaccatttcgtccttggtatttgcagcaagctgataaatgggaaacccggaaacgtaaccgttagcattgcaataccatatcgctgcggtactgagagaagtaatttacctcgtaatcgcgacgtggcgtcttgagttggaacgcatatgacgcgcgctgttggacagacatttaatccggttacggtggaaaaaaccttgcacaacggtagcgcaggtacgtaccgcttctggtttggccttagctagaaccgcgcccaacaaactaattgacgtaacgtcctgttggttcacgtttgacttgcagtagagcagttggtcccccttgatgatgaaccagcgctttctccacaagcccgggtccctcgagctcgccttctgaagatatcccgagtagacacccttcaacaagtataaaacattagtgcgtctactactaacaacactattccagcatttgcattttgctcacctttcctaataacacggggaagttgatagactgcgtattgggtcccgggcgctttggtttccctccattttcactaatatccaaatgagatccccggacgtcctgctcaccaaaacatcacaaacaattccttgattagaacacaccacatacgaacaattagcacaaactctctcaccttgagcacaaacttgacgggtggtttcttccgatgttgcactcttgtcctcgtggtgcctccgatggtgtcgtccgcctccacgctttgcgccggccgcgcgcggttcagtctctccacgagcggtagaatcagctcttcgtccctcaacgtgcgcgcggacagcgaccccgcgttgtccgtggggaacaccaccacgatggcgtagttgttgaagtcctccggggggatgtcgatcttggccgccatggacctgcgcacctccagcaccgtggtggtgctcagcagcctaaagaccgtggacgacgtgaagctcttgctctcgaagaaaatgcgcgcgaagcccgtgcggtcctgccccttggcgcgcatgagcgccgtggcgctgctggagctggcgcccacgctgcgcttgcgctccatggcggcctgcatcatgctctgcgagctgttgtagcgccgcatgggcaccgagggcgacagcgcgtcgttgccgcgcacgcgcgaggccagcgccagcacgttggaggccgactgaaccgtctgcacgcgcggctccgcggggctgcgcacctcctcgtcgatggagagcggcgcgggcggcggcgggtcggacgccttgatctcctccgccaggtcgcggtaccgcgcgccgtcgctggagtcgaagtagctgctgctgctgccgccgctggagatggtggccgtggtcatgcgcgtcatggggcggtcgaacgggtcgtccgggctcgagccgagcggcgccttgggcttctcctccagctccaggagctccatgggcggatggctggctgcggtctgtagcgccgacgcgatgcgatgccactgcgcgtcgtggcttcgcttcgcttccttctggcggcggtcgtcggcttgcgtggataatgggcaagggggtacatttgtaattacagaaagtggaccagaatgggtacaaggggaatttgcctagcatggatgatgttagtagctttgctgcggactttggcgtggctatccaatagaccttgtgtcagtgcgcggtatgttaacgtggatattgttgctgccggcgctttaattaactatgccttgcgcgtgaagcgcgactgcctgtatccattgccaactccattgttgttgggagtctgacccacaattgacagggtcagtagaaatacgcgctcgtgctctggagatagatgtgctgcggtgctcgagtgtgctgcactgacagatcaacgtcgcacaccttggtgctgttattgtggtgctgactacttcatcgatcgtaatatcacgcccgagctcctgacgacctaagatacctgcatctcattcactttagtgtgaccttcacgtagtttgctgcatttggtgccgttaacaatgccgctggtataccttgctggtggattgcggttgcagggattggatgatattagaaacactggcactgcgacgcggtatgaatatgctaccaaccttgttaacctgtgccgggccggcaaatagtacttaagtacttgaaccgtgcccagcagacagctactactaattcgcgacgcgcaacagcagtgagcgtattgggccgatacccctcacttttccggcggcaagtgtcttccaggtttcgcgtggcaatgcaacagcttttcgagatacacagtatattgatcgtcaatacgcggtcgggaccagctccttcctgcaccctcgttgatcgccgactaacttaaaacattctccctcgacatttctgcatcatctcacagcaggaagatatcctcctcaggccgcttgtagatggtggtgcgcttgccagggacgtccagcacttcgttgatctgctccgtgcacttgcggtgcgcctcgctcgacgtccacgcctggtagtccttcagtgacttccactgaagcagcaataacagcaacaaaactccgtcaaaggcacgtacacccaacccaccagcaccaccaatatcttgacgcacctccgacagcaccacgtatttgtggtggtcgttcacgtcgctcagcgtctccagcgagatcagaccaggctgcgaccgcaccaccttgtgcacctacagcaacgcaacaagacgcacacattaataatcatcaatcttctctcagctcagttgtctgtcttttggtccgtacgttctccatcaggcgcacgacagtgggctcgaagccgcggctcatgatgcgctcgctcagcactcgcacaggcttggacagcattgtctctgggtttgctccggttccttgggctccgcttgtgttgtggtgtggtgccaacgactgcaactcggcttgcgtcgacttgcgtttttccgccccacgtgaactttcataacacaaggaccagcgacctccgaggtcggctgcatactaaagttaagctgcggattggcttgcgcaaaatgtagccatgtgagcggaagctgaagcagtgaccgaagttgaagcagagcaggtggagaactgaggcagatgaggaaaaaaacacacgttgctgctgcagagctcattggcaattgagattgaagccattgcatgtggcacggccaacctcgactggggcgacggcgacgtggcagcagacgtgaaagaaggccctaatagcagcagcgacggttcgtggcgatcgaggtcctttgcgaggaatgcagcaggacgaagccgaggatgctgctgctcgcagtgaagacggtgaggagatgcaggcgttcaagctaccgttgacagaggagaacgtggcgctgggacggcttgggcgcatttacaaggccctggacacgaaaacgtgggtaggccctgagtttagagatttgttatcggcttttggcttagttttgatcatcgctgctgtagtggtcgagtactcgcagtggaacgtatcgatgtggtagatgaatcggatgaagtgggtgaggagagctctcctgctgaattcgcgcagcaagtgttggacactgagctcgaacgctacggtgaggttatccgtggcgagaatgctcgtcatgtattctgctacgacgcagtgagttgtactcgcagtcgagtgtatctgcgttcctcttcctcggtcgttcgcagtcttgcagcgtaagcaagccgttagggtgcggtgttgttccaatgacggaaactcagaaaacgtgtcgtagtcttcaacaggacttcgagcgtttccaccccttagcagtcaggcaatacattcatcaggtcgtccagggccttcgagtactgcacgaggtgttgaacggtatttggttggcgttgtttttatcttatactaacgtgctgatttgtgttttgtgtctttttattaagggcgggatatcgtgcggcggtgtaagtgtgacgagaagttattgcattcgttctgaatctggatacatttctaacaattatttacatgaagctttcgctttcttcacttatcgtatgtggaggaaacatcgtgaagatagcagcttggtttccgtctacgcaaacaataaggacgcttcaatcacaaaagtacgttggttttggatgtgaggggtgtccttgatctttacgctaacgcctgctatttgaacgtgcatactatctatccagcattcttatcgattcacaattctgccgttcaagcttcaatttaccgcaagaaattgatgaaatggcccaagatatacgcagcgttgcgtacgtaatgctggagatgcttactggtctccgggttcgtgggtctctgatggagaagtacaacattttggccaaagttggtgcggactcccttgaatatcaagccttgcgcagtttgttggaggtgaagccgctagaagaggtgttgagatgtgcatacttttcatcggtgtatcaagcagacagcatggcgattcgaaacctagctcaagcaactcaagaacagcggcacatcattggagttctcaccaagcaagagctgacaaaatgccagaccatgaagcgacagtatctgcagcaagtccgagcgtggcaagctcagtttgagaagaaataccggcgaaagcctaatcccgcggaccgaccgactggaattgttcgtcttcaagggcgttgtatggcccttaatgagcggatgcaagagctaaatgaccgcctggctgctgctcacggcagcatttaccggttgatttcgagcaagggggttctagcgatcgacgcaaccagtccgcgcacagagaaagaagatatcctcgaccagccgaagaaaattgaagaccctgcagccacgacgtcaactgaatccgatgtaagcaggtcaggttcctttgatcaaggtggagggaaaaggtcacctgcacagaaagcattcttgaatcgtttcggctcacagtgacagtgtccgcaaaggcggttttttaacgaactctaacatggtttcgtggtcgaatcaagcttcagtaaattcgcaatacgaactacttttagatgagcacaataccctactatcccgagatagctggtcacaagtgtcattcaaccttcgaactcagctagcatgtttccgttaaatgggccacgcgcgtctccgtcgggctttgtggacctctccagccgcagctttgcactatggtggttcatcattcttgcagtgcacttggtaacttgtggatataacgcgatctacgcgctcgtctactggaaactgcaatcgacctacctctatctctgtctcgagttcgtcggaatcgggatggcggccactgatcatcctgctattgctagtgatggctgtagtgcacggcatattcttactctcaatgatcggtggctcactgtggcgtcggcagctagcatacaccccatggctgcaaaagcatgagcttgctgccacaatgagcaccgaggctatcacatccagcagaagtcgtttatctgttgcgaagcagctctcctctcgcatctactccgaaatttgggatcgcgagggcctgctgggcgtgaacgggaagaagttccacgcgattcttgtcgcccgtaaagttgtggagataacacttcagacagtgcaagcgtatcgaatgaggtggttcctaccacgaaaggtgctcaaccggttttacctgagtctgctagttatgaactgctggtcttctgtgctactggtcctattccgacgaagcgaagcccacaggcggttcgctagtctcgtttgggactgcatgctcgatcttattactttcattggcatacccttaatcatcgtactcagctacgtgagcgactacgacacggaaacccaaggcttcgatatgttgaaatggtacgatgacgaatggactgctgtactgctaaacgaggttcaaatggtggtcgtcgtctcttggtcggatttggcgagtcgcaccatattttcgcttggattggttttcgtcacggcaaacatgaaggagctacttcggagagcaccaggcataaaacgcataggtgcggtaacaaacaaaattgtggttcgtaacaaagctgacaaccacggtccggcagctcttccagcctcgaaaggtgccgcggtggcttctgcctccgtgattgcgagatttagccgtaactatcgtggcacggggttgcgaacccgtttcgggcacagaatgctgcaagctacgcacgtgttgttcggtgtttggggagttgtggtgctggcaccacatattcaggctgcggtgatgcctactctacctcaatgttcgctgcaagtccatccttgggggttatcaagaccagcttgctatttagtggttctcgattgccatcaactcgaaatctcgggaaagagggatgaagttgaggcaaagtggggtgaattcgaccgatccgccgtggttgcgttactaattcgtcattgccctgctctcgaagttcctgactcattcaacgagtttcgtcgtgtgaccaatgtcaagctgtacaattcaaccatccagcaatgggacgcctctgcagccatcactaatacccaccacccgaacgttgtttggctgtacgtgatccgagtcaatatgaccaacggtgtcctccccgctgggcttcaatcaaccgatttcccgctcacattgcaagacattgagttctgctacacaaatttgcgcgagctgcccgacgacctcgagttcaaacggctgctgggatcaatagttttcatcgagcacagtcaactcacttccgtgccaccggcgctgatccggctagagccttactatgtctcgctgactggaaacccaatcaccgagctttcgccagacatctttgaaatcccaagcatagcatatctgatactgggtgatattgacattgtggagctgccccgcgatgttccgaacctctctccgatgctgttctcgatttacttgagtgacaccaatgtatccttcttctggtcgtggatcgacgcattggttttgcggaattcagagcttggagaaccaacattgttcttgggaggatcgacgtactgcaccgagctggcaatgctaatggatggagaggcgtcgtcttttggcgtgaaagaatcggagggatattccgaaatactcgtggatccgtcggatgcaactcgcgacgtgatactaaatactgttagctgcgatgaagcgtacacagcaacgttttacccgattgatgtcgaagatgcgaacagcgctatcgtgaattcagcttagtccataggagtactattgcggcaaccacggtgtgcgtgtcgccggaccgcggcgagatagccccaccagcacgacagctgaggacgcgccgctggccacagacaaaggtctgctcgcgccggacgtagcacttcagagcgacgcttcccgccgcagcaccgcagatcaagccgatggatctgcctgtcagcgcgccttggccgccgaacagcccgaccgagccgtcgctagaacctgtcgtgctggcggagctgaggccgggcgtgattgataacttgtcgctattgccgaccgagctgtcgcccacgcgcaccgacccattttctcgctcgcgactagtaccgctcgttagacgcagactgacgctcacgccgctggtgctcgccgatttcggagtcgtcagcgatatgtcgtcgctggacgtcgtcaggcaggtcgacccgccactcgccacgccaccgccgtcgctcaacgagatcgagcccccgaccgtgccaacgaccactgtccagaagtgctggaacggcggtgtcctcagcgccaacacggacccatcctagcaatgcaccacaacaacatccaaccttcctaatcctcactccgtccggttttcattccaacccgaagacaatgacgctgacaccaatttcgtttagactattgcaatagagatagcgagaatacctgtctgccggtgctcttccatctccagctcgacaagcctaccttgtgtgtcgcccgatgccatccgtcgtggccagaacgctgggcggcgcagcgcaatcggccgcattggatgcaggcgcccttgctcccgcgagtacgctcgcacgttgcggcctccctcgccgccgccacacacgcgttaagccgtcgcggccacgtccggcagcaccacgtacgctcgcaggtggcgcgttgctcccattggccggcaggatacgcgaccccgtgacgcgcccaggtgacgccgcgagcgcatctccatttgacgaggtcggcgtggagaggtcacaagacgcaggtgtcgcaatagccaggggataggtttgattcttttgtttcatagaacctgtcgttaatcatctccttgccactaaacacgggggaacgtcagccgcgtacgctctcatgcgggccgtaaaaactctcgtaaaaagcccttcttacccagcgcagttcaacgtgcaggatatccgaggtcgactacgtacctcctgcctgcaagtaccggatccggtgccacagctcaagttgctctgcagcgcgcactcactccgccgccgcccaagaacccacccacccacctccaccttccacccctacccagtgcagtagcagccatggccaagcagcacctcgccaagggcatcggccgcatgtccgagatgatcatgaccaagggcaagggctcgtggatctggacgagcgacaaccgcaagctgctggacttcacgagcggcatcgccgtgaccagcgtgggccactcgcacccgaaggtggtggccgcagtgcagaagcaggcggccacgctcgtgcacgcgcaggtgaacatcggctaccaccagcccatgctggacctgacggagaagctgctgccggtgctgcccaagagcctggattcgctcttcttcgcgtgcagcggctcggaggccgtggagaacgccgtcaagctggcgcgccacgccacgggcaagagcagggtgatcgcgttccagggcggctaccacggccgcacggtcggcaccatgagcctcacgtcgagcaagacggtgtacagcgccggcttcggtccgctcatgcccggcgtcacgttcgtgccgtacccgtacgcgctgcacggcccgatccacgacgaggagaagaactccgagtggtgcctggagcagctgcgcctggcgctcaagcagcagtcggcgccgcgcgacacggcggccatcatcatcgagtcggtgatgggcgagggcggctacgtcgtgccgcccaagagcttcatgaagggtctgcgcgagatcgcgtcggagaacgacatcctgctgatcgcggacgaggtgcagtccggcttcgggcgcacgggcgactacttcgccatcgacagctactttgacgtgcagccggacatcctggccttcgccaagggaattgctgacggctacccgatcagtggcattgccagccgcaaggagctgacggacacgcagcctgctgggtcgatgggcggcacttacgccggcaacgccgtggcgtgcgctgctgccattgcgacgcaggaggtcattgcggaggagaacgtgctggagaacacgcgcgctcgtggtgcgcagctgcgcgccggcctcgacaagctcaaggcgtcgggcatgtacccgattcaggacgtgcgtggcctgggtctgatgctcggcatcgagttcgacctcgcgaaggccccgataggcacggccaacaagatctcggcggcgtgcctggaccacggcatgatgctgctgaccacgagcatctacgagaccctgcggttcatgcccgcgcttacggtgacggaggacgagtgcgcgcttgcactggagattttcgagaaggctctggacgacgtgttcgcgaagtagacgtgttaggtcctagtaacccgatcaatgtaatgtttgttatactgttcattgacccaattgcgctggtgcagtatctctcaactcgctgcagaagcttgcacttcacagatgaatgcctgactggatacctacaagcaacatcagtctcgcttcaacaatagtctcgggacaactgtgtaatttcagctgcgataatctactataaaatcgatcccagggacccaatggtaattttttttctaaaacgagtttttagcaatcacgtttagttaaatcaagtcaaagggagggatactaattaatttctccatcatattcgttaggtcacctacagtaggtggaacacaattgccgatttttcagttgatttattttatttaataaacgctttgagaaattacttcatatttgtttagaagctgaaatccttaacaacttaactacattacataaaataccattgctagaataaacaccgctggcaaaaaacaaaaattaaacaatgagcctctgttgctgatctacaacgaaaggagaaaacaaaaaacggtcttgcataatttttagtatagtgcacaacgcactctgtcctaaacgaggctacatgataatgttattacaatgctgtattaaatcatgtgaaggggctggcgattttgtaattttgagtttttcaaatatttaaaaacgtccactgttatacgaactttacagcaagggaatgagagatgtgggtgcccttgttgtatttgtatgaaatgggacagttttgaagaataaaaagttcaaaatatcaaaactttcgggatacctggtatgaaactaacaacccacctgtactaaaaaaataaactgtttttgtacatctagtcaaacatatcaaaacagcaattcataaaaggtgaggtgaggcttcgctgaagtctattatgagcataattagaaatatatgcactagtgacgatgattgttttatcgtggtggtctatcatctagccttgtaaattatcaatttcttgttatctacacaatccagagcggatattaccgaaactcgtttttcaataagctaaacatttcatatttcgacacaaaaggtggtgagtcaagctctgtttctcttttacccccctctctaaaacacaagtgaattgaaaatgattcagccttaaataacaaaaaactggaaaaatctagctgaaattgttttacttttttagattgcttgtaaggttgcaaaatttagttcacataacatcgttgcgatgtaatattgcatgcattgtaaaaactcactaccttttctaataatagaaataataatgttttctatcatgtaacaaatttgacgactctgtcatcttttactagagtcagcatgattcagagcaaaaactaggtaaagaaacagttttttctaacaagttgtcactaaaacgttttcatggcctggcctgcctgatcgtgacctcgagcaccttaaagtaatgcttgaactcttcgtcttcaaaagaagctacctgttcacatacaaatacaacaagggcacccacatctctcattcccttgctgtaaagttcgtataacagtggacgtttttaaatatttgaaaaactcaaaattacaaaatcgccagccccttcacatgatttaatacagcattgtaataacattatcatgtagcctcgtttaggacagagtgcgttgtgcactatactaaaaattatgcaagaccgttttttgttttctcctttcgttgtagatcagcaacagaggctcattgtttattttttgttttttgccagcggtgtttattctagcaatggtattttatgtaatgtagttaaccctttagtgttcaaaattatacttgagttttgtaaactgaaggccccatggtaaagtgtataacatgcataaatgcttggttttgcgccgcaccccgcagcataatatatcattttgcaggagtttaccaaaaattatcgcaattattgttgtaaaaccttgcaaaatgcttggttttacgcaagtgatataataggtcaaaatcaatagaggtgtgatttgactggattaaatttgtaaaaccaagcatattgcaaggttttaggaccatcaaccacaatagggttaagttgtaggatttcagctctgttgcatgtacagcgctacactccgcctttgtcgcgtgagactaagaagcgacaaagactggctaagggctaagtcccactgaccgctcacagacataaccagtggatctactgtttcaattgcgcacatgggaagcaccttcgggacaagtacacgtttttcgggatggcgtgcgtggtggatggagttggagacaagaagcaccccgcggagcatgccaagtacaatacccattgtgcgaccgcgcgccctggatgcgggttggctgcttcgaaggtgggcagaccacccgaatccaagtcggagctccaaattcacgtatggatgtctccacgacgggtgtactcgcccgacgtgcacacgtagaaggcacaaaaattgtccgatagtgccgtgtgatagggcggtgacctgtggccccggtctgcagtgcgttcattgttattactgtgtgtggcaggcttgggttggaggcgacacgtaagctgaattggttccggcatcaaagatgggaatgaatccgagaaagatgcagtcatttgcgggaagcgagatgactagagaacccagtgcaaaaggatcggcctggtagcgttaagtccatatgaaatgtgtggattgcaaaacaacgaaacgatcggtaaaatgcagcgatgggcttctccttgtctcgtgtcttcacaaaataaaagtcaagacgacgactttcggtattcctcgacccgaaaaagctgttcatgcaagacgtgcggtgttacgatggggacgtatgtctatgaaggaggcaaggctatctacggctctccttccgccaagaagtgtagcgatttggatgagctgatcgacgtgataaacccaaagtgtgttcacgatggtcgtgcgactcaatctacctttggggcggaataggaacactgcttgactgtcgtgctcattctgacgatggtatggaggacgtggtcaacaagcgctgtgtggcgtgcgagatgaagatggcaagtaaggtgtttcggacgcatagcaggaagtgctacttcaaggagcatccggacgcgccagatccaatcatcgacaaagatccgtgaaaacgcgttcacggaggagttggtgattttttccccttctatgaagagggactgtgcgggtcttccagacggattcatgcgatgtcaaggcgttttcgtcatcgttgagattgacgaagagccgcacgtagcccgcgacaagctggacgaaaccaagcaaatgaatgaggtgattcaagataactaaggtctccccagttgtatggtgctttcgaactcgggcgggtacctgcgcaactgtgaacaggtagcttcttttgaagacgaagagttcaagcattactttaaggtgctcgaggtcacgatcaggcaggccaggtcatgaaaacgttttagtgacaacttgttagaaaaaactgtttctttacctagtttttgctctgaatcatgctgactctagtaaaagatgacagagtcgtcaaatttgttacatgatagaaaacattattatttctattattagaaaaggtagtgagtttttacaatgcatgcaatattacatcgcaacgatgttatgtgaactaaattttgcaaccttacaagcaatctaaaaaagtaaaacaatttcagctagatttttccagttttttgttatttaaggctgaatcattttcaattcacttgtgttttagagaggggggtaaaagagaaacagagcttgactcaccaccttttgtgtcgaaatatgaaatgtttagcttattgaaaaacgagtttcggtaatatccgctctggattgtgtagataacaagaaattgataatttacaaggctagatgatagaccaccacgataaaacaatcatcgtcactagtgcatatatttctaattatgctcataatagacttcagcgaagcctcacctcaccttttatgaattgctgttttgatatgtttgactagatgtacaaaaacagtttatttttttagtacaggtgggttgttagtttcataccaggtatcccgaaagttttgatattttgaactttttattcttcaaaactgtcccatttcatacaaatacaacaagggcacccacatctctcattcccttgctgtaaagttcgtataacagtggacgtttttaaatatttgaaaaactcaaaattacaaaatcgccagccccttcacatgatttaatacagcattgtaataacattatcatgtagcctcgtttaggacagagtgcgttgtgcactatactaaaaattatgcaagaccgttttttgttttctcctttcgttgtagatcagcaacagaggctcattgtttattttttgttttttgccagcggtgtttattctagcaatggtattttatgtaatgtagttaaccctttagtgttcaaaattatacttgagttttgtaaactgaaggccccatggtaaagtgtataacatgcataaatgcttggttttgcgccgcaccccgcagcataatatatcattttgcaggagtttaccaaaaattatcgcaattattgttgtaaaaccttgcaaaatgcttggttttacgcaagtgatataataggtcaaaatcaatagaggtgtgatttgactggattaaatttgtaaaaccaagcatattgcaaggttttaggaccatcaaccacaatagggttaagttgtaggatttcagctctgttgcatgtacagcgctacactccgcctttgtcgcgtgagactaagaagcgacaaagactggctaagggctaagtcccactgaccgctcacagacataaccagtggatctactgtttcaattgcgcacatgggaagcaccttcgggacaagtacacgtttttcgggatggcgtgcgtggtggatggagttggagacaagaagcaccccgcggagcatgccaagtacaatacccattgtgcgaccgcgcgccctggatgcgggttggctgcttcgaaggtgggcagaccacccgaatccaagtcggagctccaaattcacgtatggatgtctccacgacgggtgtactcgcccgacgtgcacacgtagaaggcacaaaaattgtccgatagtgccgtgtgatagggcggtgacctgtggccccggtctgcagtgcgttcattgttattactgtgtgtggcaggcttgggttggaggcgacacgtaagctgaattggttccggcatcaaagatgggaatgaatccgagaaagatgcagtcatttgcgggaagcgagatgactagagaacccagtgcaaaaggatcggcctggtagcgttaagtccatatgaaatgtgtggattgcaaaacaacgaaacgatcggtaaaatgcagcgatgggcttctccttgtctcgtgtcttcacaaaataaaagtcaagacgacgactttcggtattcctcgacccgaaaaagctgttcatgcaagacgtgcggtgttacgatggggacgtatgtctatgaaggaggcaaggctatctacggctctccttccgccaagaagtgtagcgatttggatgagctgatcgacgtgataaacccaaagtgtgttcacgatggtcgtgcgactcaatctacctttggggcggaataggaacactgcttgactgtcgtgctcattctgacgatggtatggaggacgtggtcaacaagcgctgtgtggcgtgcgagatgaagatggcaagtaaggtgtttcggacgcatagcaggaagtgctacttcaaggagcatccggacgcgccagatccaatcatcgacaaagatccgtgaaaacgcgttcacggaggagttggtgattttttccccttctatgaagagggactgtgcgggtcttccagacggattcatgcgatgtcaaggcgttttcgtcatcgttgagattgacgaagagcagcacgtagcccgcgacaagctggacgaaaccaagcaaatgaatgaggtgattcaagataactaaggtctccccagttgtatggtgctttcgaacacgggcgggtacctgcgcaactgtgaacaggtagcttcttttgaagacgaagagttcaagcattactttaaggtgctcgaggtcacgatcaggcaggccaggccatgaaaacgttttagtgacaacttgttagaaaaaactgtttctttacctagtttttgctctgaatcatgctgactctagtaaaagatgacagagtcgtcaaatttgttacatgatagaaaacattattatttctattattagaaaaggtagtgagtttttacaatgcatgcaatattacatcgcaacgatgttatgtgaactaaattttgcaaccttacaagcaatctaaaaaagtaaaacaatttcagctagatttttccagttttttgttatttaaggctgaatcattttcaattcacttgtgttttagagaggggggtaaaagagaaacagagcttgactcaccaccttttgtgtcgaaatatgaaatgtttagcttattgaaaaacgagtttcggtaatatccgctctggattgtgtagataacaagaaattgataatttacaaggctagatgatagaccaccacgataaaacaatcatcgtcactagtgcatatatttctaattatgctcataatagacttcagcgaagcctcacctcaccttttatgaattgctgttttgatatgtttgactagatgtacaaaaacagtttatttttttagtacaggtgggttgttagtttcataccaggtatcccgaaagttttgatattttgaactttttattcttcaaaactgtcccatttcatacaaatacaacaagggcacccacatctctcattcccttgctgtaaagttcgtataacagtggacgtttttaaatatttgaaaaactcaaaattacaaaatcgccagccccttcacatgatttaatacagcattgtaataacattatcatgtagcctcgtttaggacagagtgcgttgtgcactatactaaaaattatgcaggaccgttttttgttttctcctttcgttgtagatcagcaacagaggctcattgtttaatttttgttttttgccagcggtgtttattctagcaatggtattttatgtaatgtagttaagttgttaaggatttcagcttctaaacaaatatgaagtaatttctcaaagcgtttattaaataaaataaatcaactgaaaaatcggcaattgtgttccacctactgtaggtgacctaacgaatatgatggagaaattaattagtatccctccctttgacttgatttaactaaacgtgattgctaaaaactcgttttagaaaaaaaattaccattgggtccctgggatcgattttatagtagattatcgcagctgaaattacacagttgtcccgagactattgttgaagcgagactgatgttgcttgtaggtatccagtcaggcattcatctgtgaagtgcaagcttctgcagcgagttgagagatactgcaccagcgcaattgggtcaatgaacagtataacaaacattacattgatcgggttactaggacctaacacgtctacttcgcgaacacgtcgtccagagccttctcgaaaatctccagtgcaagcgcgcactcgtcctccgtcaccgtaagcgcgggcatgaaccgcagggtctcgtagatgctcgtggtcagcagcatcatgccgtggtccaggcacgccgccgagatcttgttggccgtgcctatcggggccttcgcgaggtcgaactcgatgccgagcatcagacccaggccacgcacgtcctgaatcgggtacatgcccgacgccttgagcttgtcgaggccggcgcgcagctgcgcaccacgagcgcgcgtgttctccagcacgttctcctccgcaatgacctcctgcgtcgcaatggcagcagcgcacgccacggcgttgccggcgtaagtgccgcccatcgacccagcaggctgcgtgtccgtcagctccttgcggctggcaatgccactgatcgggtagccgtcagcaattcccttggcgaaggccaggatgtccggctgcacgtcaaagtagctgtcgatggcgaagtagtcgcccgtgcgcccgaagccggactgcacctcgtccgcgatcagcaggatgtcgttctccgacgcgatctcgcgcagacccttcatgaagctcttgggcggcacgacgtagccgccctcgcccatcaccgactcgatgatgatggccgccgtgtcgcgcggcgccgactgctgcttgagcgccaggcgcagctgctccaggcaccactcggagttcttctcctcgtcgtggatcgggccgtgcagcgcgtacgggtacggcacgaacgtgacgccgggcatgagcggaccgaagccggcgctgtacaccgtcttgctcgacgtgaggctcatggtgccgaccgtgcggccgtggtagccgccctggaacgcgatcaccctgctcttgcccgtggcgtggcgcgccagcttgacggcgttctccacggcctccgagccgctgcacgcgaagaagagcgaatccaggctcttgggcagcaccggcagcagcttctccgtcaggtccagcatgggctggtggtagccgatgttcacctgcgcgtgcacgagcgtggccgcctgcttctgcactgcggccaccaccttcgggtgcgagtggcccacgctggtcacggcgatgccgctcgtgaagtccagcagcttgcggttgtcgctcgtccagatccacgagcccttgcccttggtcatgatcatctcggacatgcggccgatgcccttggcgaggtgctgcttggccatggctgctactgcactgggtaggggtggaaggtggaggtgggtgggtgggttcttgggcggcggcggagtgagtgcgcgctgcagagcaacttgagctgtggcaccggatccggtacttgcaggcaggaggtacgtagtcgacctcggatatcctgcacgttgaactgcgctgggtaagaagggctttttacgagagtttttacggcccgcatgagagcgtacgcggctgacgttcccccgtgtttagtggcaaggagatgattaacgacaggttctatgaaacaaaagaatcaaacctatcccctggctattgcgacacctgcgtcttgtgacctctccacgccgacctcgtcaaatggagatgcgctcgcggcgtcacctgggcgcgtcacggggtcgcgtatcctgccggccaatgggagcaacgcgccacctgcgagcgtacgtggtgctgccggacgtggccgcgacggcttaacgcgtgtgtggcggcggcgagggaggccgcaacgtgcgagcgtactcgcgggagcaagggcgcctgcatccaatgcggccgattgcgctgcgccgcccagcgttctggccacgacggatggcatcgggcgacacacaaggtaggcttgtcgagctggagatggaagagcaccggcagacaggtattctcgctatctctattgcaatagtctaaacgaaattggtgtcagcgtcattgtcttcgggttggaatgaaaaccggacggagtgaggattaggaaggttggatgttgttgtggtgcattgctaggatgggtccgtgttggcgctgaggacaccgccgttccagcacttctggacagtggtcgttggcacggtcgggggctcgatctcgttgagcgacggcggtggcgtggcgagtggcgggtcgacctgcctgacgacgtccagcgacgacatatcgctgacgactccgaaatcggcgagcaccagcggcgtgagcgtcagtctgcgtctaacgagcggtactagtcgcgagcgagaaaatgggtcggtgcgcgtgggcgacagctcggtcggcaatagcgacaagttatcaatcacgcccggcctcagctccgccagcacgacaggttctagcgacggctcggtcgggctgttcggcggccaaggcgcgctgacaggcagatccatcggcttgatctgcggtgctgcggcgggaagcgtcgctctgaagtgctacgtccggcgcgagcagacctttgtctgtggccagcggcgcgtcctcagctgtcgtgctggtggggctatctcgccgcggtccggcgacacgcacaccgtggttgccgcaatagtactcctatggactaagctgaattcacgatagcgctgttcgcatcttcgacatcaatcgggtaaaacgttgctgtgtacgcttcatcgcagctaacagtatttagtatcacgtcgcgagttgcatccgacggatccacgagtatttcggaatatccctccgattctttcacgccaaaagacgacgcctctccatccattagcattgccagctcggtgcagtacgtcgatcctcccaagaacaatgttggttctccaagctctgaattccgcaaaaccaatgcgtcgatccacgaccagaagaaggatacattggtgtcactcaagtaaatcgagaacagcatcggagagaggttcggaacatcgcggggcagctccacaatgtcaatatcacccagtatcagatatgctatgcttgggatttcaaagatgtctggcgaaagctcggtgattgggtttccagtcagcgagacatagtaaggctctagccggatcagcgccggtggcacggaagtgagttgactgtgctcgatgaaaactatatagctgattaagggtataccaacgaaggtgataagctcaagtatgcagtctcaaacgagactagcgaaccgcctgtgagcttcgcttcgtcgggataggaccagtagcagctatctcgggatagtagggcattgtgttcatctaaaagtagttcgtattgcgaagttactgaagcttgattcgaccatgaaaccatgttagagtacgtaaaaaacccgcctttgcggaaactgtcactgtgagccgaaacgattcaagaatgctttctgtgcaggtgaccttttccctccaccttgatcaaagcaacctgacctgcttacatcggattcagtcgacgtcgtggctgcagggtcttcaattttcttcggctggtcgaggatatcttctttctctgtgcgcggactggttgcgtcgattgctagacgaaatcaaccggtgcccaactaaccggtatgtctgctaaggcagtgaaattgctccatgcataggccgcaaagcgatgagtaactgcagtagtcgtggcaatcgcttcaaaggtgtcgataccgtcgcttgcgtttggaaagcacggataacgccacttcagcgtcattgccgtggacttattatattagatgccttactctgctgcctgcgatgccggagccggcttgttactcagttgctcatacagctctacgatctgcagtccaaacccccagttcaaacgacattaaaactcaacggaaaacactaggaaaacattgttggaccaccaaagcatgccgctatgcagacaccacagtgctgattattttagtgcaatggtgcgccacccacctgcgagataaactgcttctgctccttcaagagctgcgccgtggtatccgcgcccgtgacgctggctcctcgccggcggttggccgccagcgccgccgcgatcttctgcgcgttgttgtccacgcactccaccagctcctgcacgcgctgcatctcgtcgggcaccacgtcgccgcgcagcagcagcgcgttcagcagcgtccggctgccggtcacgaacttctcggggccctccgacatttacaacacaaaaggaaaagtgtacccctaaaagttacacgacgtatccttatcagacctgttaacccactttaatgacagtaccccctcgtgtaccccatacaaactccaagtcaatcttccccagatccatctcacagggagaaaaccccagcttccgcaccgaccgacacccggcagcatcggaacgacatgtcggcggatctgttcgcggactggaagaaggaggaggagtccttcgactcgcgcgggggcggcagcggcggcttcgatggaggcgccggcatgtacgagtctccgtacggcgccggcgccgcctccgccgacacgtacggcggcgcggccgacacgagcagcaacgacgacttcgacttcgagactgtcggcgacgacgcggagggcgccggccaggaggaggagaagcccatgttcgagctgcgcgagcacgggctcaaggtctcgcggcgcaagggcttcacgctcagctgcatgggcgtgggcaacggcgtgctggccatgggctcgcaggagggcatgctgctgcgctgcacgacggaggccaccgacagctccggcaccgtcgaggagatcatgatcgagccgcgcgtggccatgtccaacgtgttcatcgaccccacgggcgcgcacgtgctcatctcgatggagaacgggtcgaatttctacctgcacacgggcagcacgcggcccaagaagatcatgaaggcgcaggcgctgcagttcacgagcgtggcgtgggaccggcagtccggcacgcccgaggcctccgagcccgtgctcatcggcacggactcgggcgccgtgttcgaggccgagttcgacggcggcaaggaaaagtccttcaagaaggtgtaccagatctccaaccaggggcccattgccggcatcggcttcgagcactggaagctgccgtccggggacttgcggtactacgtcatgctcaccacgtcggcgtcggggaagagacccacgcgcatgttccagttcattggcggcggggctggaggcctggaggggatgttcaacgagtacacgagtccggacaagttgaggttccaggagctgccgggggatgtcaccacggcggagctgaggttttatgctaagcaggagcgggagcgcgccaagggcttcggagtgctcactggtgagggcgtgtaccatggagaattcgtgttcggactgtcgagtacgatggagaacgtggccacgggaacgggcttgttggcgtaccccggtaagcccgagaagtcgtcgggtagtcgtggctcgtggacgccgcccatttccatggcggtgacgcagtaccacgtcattctgttgtacgcgcgccatgtgcaggtggtgtccaagttgagcggcgtggtggtgatggaggagacctttgactcgagagtgggtaacgtccacggtatcacggtggatgacacgttcaacacggtctggatccactccaaccgccgcatcctggaggttgtgatcgctgatgaggaccgtgacgtgtggaagctgttcttgagcaaggcggtgatgggcaatggcgacgaccgggacttcgagcaggcgcttggtgtgtgccgcaatggctgggagcggcagcgcgtgttgacggcgcaggcggacaagcttttcgacaggggagagtacgaccgtgccgctgtcatctacgccaagacgacgcgctcttttgaggaggtggcgctgaagttcttggagaaggagactcgcgactccctcctgcttttcttgctgcagaaactcaagagcttgggaggcgacgagaagacgcagaaaacggtgctgtgttcgtggattgtcgagctgttcttggacaaatttaacgtactcaagggcagcgcgcaggatgtggacgcccacgcgaacttgctgttcgagttcaagcagttcctgcaggaccagaagacccacctcgaccccgccacgactttcaatttgatttccagccacggtcgaccagatgagcttgtcttttacgctacgcttattgaggactacgagaaggtgattacataccacgtggaccgtggtgagtatggagctgccatcgagctgctgcgtagcgtggagacgtcgaaggtcgaggagctctggtacaagtactcgcctgagctgatcatccacaagccaaaggaggtgtacgaggcgtggctcgaagctgccacactgaacccgacgcggcttatcccgtctattgtgcgtcatgtgcaccaaaagagcggcgggggcagcgacccagccagcaacacgaccaagaaccgatcggtgttggatatggctatccgcttcctgaagttcgccatcaagcagggcaaccgggaccccacgatccacaactacttgctgtttttgctggccaagcaccccgatgagcgcttgctgatcagtttcctgcgcaagaagcacaatggcaagcatttgttcgacattgccttcgctctgcggctttgcacgcagaacgagaagaatcgcgcctgtatctacatctactcggccatggggctgtaccaagacgctgttgagaaggccctccaagtggatgtgaagattgccaaggaaatggcgagcatgcctgaagatgacgagactcgcaagaagctctggacgctgattgccaagcatactattgatgccggtggtgagatcaaggatgccatgaacatcctcaaggagagcggtctgctgaagatcgaggatatcctgccgttcttccccgactttgttctcatcaacgacttcaagaaggaaatttgcgagtcccttgaggtgtataacgaccgcattgagcagctcaaggaagagatgcaagattacacgcagtctgcagagctgatccgtgcagacatgcagaagctgcgcaagcgttgcgcagtggtgtcgggcaaccagcgctgcgagctgactggccagaacattttgggcaaggagttctacctcttcccgtgctcgcacgccttccacgcgggcgcgttgcgtcaagagatgcagaagcacctcaacagcttccagcggcaaacggtgaagcagcttatccagaaactcaacgagttatctacagagatgcccgcgagcacgaacttcttccagcggccgctgtctgccttcccattcctgaacttgtcctcgagtgagaaggaggtgatgacgcctggtgcagagggaggcagcgctgcggccacggcgaaggcaaagaatgctgccaaggagcagtcgattgcgcaggagcgggagatggtgcagcagaagctagacgagatcatcgcatccgagtgtattttctgtggcgaggtcatgatcaagtctattcacacgccattcatcacaccagaggacgaggaaaatgagggcagtgaatgggccatttaagcatgcagtggagcttggagtgagcacgcttgcacatgacagtgaggagttttgagcagttccggaacagaagtaaaggaccgctgactgtgcaggtaaacccgcaggcttttcaaatgagaggaaatatgtgttgagctttatctgtcagcgctgcggacttttgctgttatttttatcgggtgcttgagtgagtgcaagttcattgatgccatcagaagtctcgaaggaggaaaacaacaagcgatgccagcccacgagcatgccccggcaacccataggcgcaatggcctgcagcccgagtaagtgttgcgatcgttggagcaaaatgaagtttgtgacggaactgatatcggcacgcttgctctaggccaccagccccgttagtccgaggttctactgacgacgtccggaagcgaatgagtgatatttacggcgagatcgagctgagctggcgcaatggtcaatttcacctgccgctcaagttcgtggacttccacaaaacaggtaacaggaacccatgggttaatctacccgctgtttgcgcacctactcattatgtcttgaatattcccactgcagacgtcatgtttctttttgttcgagcggccatcggctactcgttggcgttcgtcaaggtgaaaacgctggaaaaggagctcgtgcaaatgttacaggaacgaaaacgctgcatcgacaacgaggcgaaagatcgtgatgaagacgaccagcaatcgcagcaacgagccatgggcgtaacagacctcaaggaccgaatcaaacgggcgatggagacgcagaagagttgtgcgcgctccatgtctgccacgtacgcccgtctggtgctacactgcagcaactttgagaaccacaaagaggacgagcgcttcttcgagtgcgtctacttcttcgtatgctcggtggtgaagcttggggtggttacagagtactggcggccgatcgaagtagagctgggattcctctttcgcggagctcaattcagtgccaacatcaagcttcatgcaaccaccgcctaccaggacggacatgtgcaaaatacctccaccgaaccccaagattcttcaaactcctcgtcgcactcgggtgcaagatctcttctggcaaatattgcgaatatcggcggtatctgtcctaacaacaacaactcgggtgttaacgccaccaactccggggctgctgggagcaagaagatgcaaagtctgccggctgcgattacgaaggacaacgcagagcgcttgaaagctgagcctggagccgtggtctttgaggtgcccaagtcgcgcatctcacacttcgctccgtcggtcccggtgcgtcgcattgtggcagagctacaagccaccaagaatcgtgcagcgcgcaacatggagctctctcaggcacttcgggatcgtattcgtacacagcgcagtgaagatcgccgttggcaacttgaagctgtcatgagtccacgtcacagtatggacctcgacgcgctagatgccgaggtatctgcagtgacggatcctgcgaccgcagcgccttctactcgcgctatgaatttattgagcccccgcatctccatgaagagcacgtacacgacgcgttcacccgcgctgaaccacctgctgccagctacggaggaacgtgtcaagcttgctctcaagtacgtactttcacatcgctctctgtacatgcaagttgctaaaccaaagtttgtgcttcgaacaggggctatgaacaggaactacaggagcatcggaactcgatgcgtgcgagtagcaaaagtgctagtgttccgacccgaagaagtgaatcccctggccgcgaactctggcgaaagtagggaagataccaaacaattgtaccttattcatataattattccttacaaccaggggaagtttgagtttcgtgacggtctcgagttcacggtagccctttatttccatccgaagccggagtgagagctggccattgaccggcgcgctgaggcgcctggtggtgacgatggggcagttcgagtactggtcaatgaagagcggcgcgtatcaccgctagtctttggcgtgcccacagcggatctagtcgcagatctgctgggggttctggatggggttgaggctgctcgattcaacacacggctggctctgctatctgttgatgacacagaagatggagacgacgctgggggagtggacgaacccactgctctatcagactgcggcctcgtgagccggcttgcggacgctctctgtctcgctgaggctggcgtcgccggcgaccctgctggccgagtcctagaaggagggtgcaatggaactcgaccctccgacgtcggggcctccttcgttcgcgtagatcgaggtgttgccagcccagacattgaacgcgtctgaagagtagacaaggacttgcgccttgagtcgttgtctacaagtctgctagcagtcgttgccgagagcgacttgcgccgcacctcgggagccaccaccttgtcccgataagtggcagacaaagatttacgtcgttcctcacgctccagcatcgattcgggtcggcgcagtcgagacactgcagaagtaggagtagctggtgcttgggttcgagttgctcctgacccacgcggtgatgctgccacttgtggtcgtcgtacagtcgagcgctgggatgtggatgccgctggctgtgcgcttcgtacacgtccggatcgtgctgaccgagctgacgtcgcggacgaagcgcttcgactagacttggctgaaggcgtggggcttggcggtctcgacggtgacggagatcgatcctccggtggcaactcgtcgtggtccagctcagcaggggccttatctccacgctgtctgccaccgaggagccacagctgccgctccagcgcttccttgctgctctgcgcttcgcgtagttcatctccttgctgttggcactgccgctgcaagtcgttcacttgagtctccatagcaagcgtcttcgcttcgagggcacgattctcttcttgcagcttgaaaagcgcgccactttccacactagggcgcacagcacccatctgcacctggctgacgcgagcaccaaactgcagcgagcaagtcgtttcctccatgtcagctgtatcgggactcagctgcagcatcatcagcgtctttgcttgtcctgacaacatgtcgcgcagcatgtacgtgagcttcgagttccggtacggcgtatgcttcgccttgtgctgcagcgcgtagaccacgtctccgagcgccgccagcgacttgttaatgtgttgggtttcacgcaatcgatcaccctccacttgactacgagaaatacgctccgagccagccaaatccaccagacacaacgtgctggtgcgcatctcacgggtctcgcggtgttggctatcgaggtgaaggaacaccagcgcgtgggagcgactactttccaggttcatcttggtagcagcaatattgcggttggcgttgccatcacgcataaccgcatccacctgagcgtagctgttaacgtcgcgcgcagtgatgtccgtctcgttcttcgccactgcattcttgccagccccgcagctgtcctcatgaagcaagtccagaatctggtcgttgtaaatctccaccatactcacacgaagcgtgtccaagtacgtcatctggcgcttattcaccatagagaacacttgctgaagcgcgcgcgggatcacacccgcattggcgtgcaccgtaagcccattggcacggtgttccagcgctccttggtcattccccaccatcgtatgtgtcttacccgatccagtctgtccgtaggccataatgcacgcgttatatccatccgtaaacgacacaaccagcggctcaatctgcgcgtacacgtccgcctgcgtgctctgcggtccaaacacctgatcaaaggcaaactccttcccagagctcgcaatcagcaagttattcggtcggggcatcaccaacgccggtgaattcccgtcctctccgctctccttcccgggcctcaaccgacagaacaccctgatcctgcccgacagttcatagtacttctccgccatggtctccctctccttcttctcggccaggtagctctgctgcagcacctgttcgcgtctattagcatcctccaccaccatagccatggcgtcctccaccgtcagcgccgcttcgtcgctatcgtccttcacctgctgcttcaccatcaccaactcctgcttcaacgctctcaactgctgcagcgtctgcatggccacgttcttccacttggacacgtccccacccaagtgcagcgtctggtacctcagcagctcgttctcctgtagaatctcctccacatccacggcctgttgctccgcctgctccagctgcaccctcagcgccgtgttctcctccgtcagactgatctgcagcgccttggcgcccttgagcttcgtgtgcagccgcttgcgctcgtactcgagctccagtaggcggctctggaaggccgcgagcgagtccccagctgctgctgagggctgctccccgcctacggagctgctggagcccaggcgttgacgcttccgggtctcctgctccttgagcagctgcgtgatgcgctccagcagctcctcgggcggcagctcctcgtactgcgggacgtgcacggccatggcgtcgaactcgagctgggacagcaccaggttcacgtactcgttggtcgccgcctgcttgagcggcacttggatgacattgcgcccgaagatgacgcggtgcgcggtcatttggggcggcgggagcagcgggttcgggtcctcagcggctagtaaggcgtctagggaggacgtggaggacgtggaggacgtcgaagatggcgccggggacagcgacagaggcccagaggcctccacggacgacggcatggggtcggagagagggaaggacggcgcccgtgggaatggagggacgtgattggtgggaattctagcggggtctgtgctatggcagttattggtgtaggttgaagggaactgtttatagagacagaggctgtgtagcattcgaggcccgagggggagattgtctgggttggagagtaaggtgcaatagttgctgtgtggagtgcaagtcgagcgtggcagttttgggtttgcaagtcaagcgtcgtacgatcgtggaggcatttagctggatatgtagccatctcaactggacttgtgtctcttcacttcgaggtgttggaatgccgcataagactcacatctgtcgctgacaacccatggctcttagattgataggacttctgctttgggttttggcgggaggtgcaagctcttgatcagttttggtttgctgttcgctccaaagccacctacccaagctgtgatccgagatgcgcggagacgacaaatgtacaaccccctccatctcgtcagcggatgcgccagcaagcgtgccttcgaccaaagaagagtcggccgcgtcttcgcctgcctcaagttcacactcaacaatcagtgacatcgcagtggcggagtccaattccaacaacgcaaaaggcagtcggaaactcaaatagcattgccactactccaagtgtactgaaactagcgtggtttccgtgttactcgtagaaaatactcacgtcgagaacacaagtgggagtgcgggcccgtgcgccagagtggggcttgtttgaatacttcgtattgattatggcggtggtgagcgttgttgcctcactactgatacctcgagaatggatccctcgattgctgtggctttttgccattttcggtctgatgaaagacctctggaaccttttcggccagctggtacaagaaaatcgccagcacataagtgatgtactcctcgctgagcttgttgctagctacagcttatctgcgcgcacgagaatcacttagcgtaccagtagatatgtgtgattccagtggtagcccaccacacatctctatataacatttcgaaaaacacatttcaccgtattcggaacgctatccatggcacattttaccattaccacacaaaagcagttcgtaattcatctggtaatgctaccgctaacgcgtattcagctaccaacctgccaacgtctcggcgaccgacgacgtaaacgggcgtaggacgatcaaggtggtttagaattcgttagtttaatctaagtgaatacatctcacccctgcagccaaaaaaacaaaacgtctcggcaaccacaccacactctcgtgcggctcactttacagcataaacatatcggcaagcgtacgagaaacggcacagcatatttcttaatgtggtgagcaaacgtttgagcgcagcggagaatgtacactgtggttttaaattttaaggagaggccctgaagtgctatctttctattttgcacagcaagccacaagatcaatctcattcacgtctctcagcgcgacttctgtcactagcaacccatggggagagggtggtgcgacctcattgccactttctattctactgttcgctgccaacacgaccaagatcttgatacttgaagtacaagatgagtggagacggcacttccgactcatcgggaaacgcactgtcagcaagtgtgcactcgatcaaagtgccgtctgcgtcttcatctgcctcagttgtgtgttgatcattcagtgccgagacgtccaattccagcaacgcagaaggttgccaaacttatattatggcgttgtcgttgtagtgaaaactgaaactaatgtgatctccttgtcttctttgtatcataggacacgatcgcatcgagaattcacctgggagtggttcatgtatgcgagagtgggggcagtctgaaagtttccaagtcggcgttctctcggtcatcttgctggtggtgagcgctgtattcccagagttgttccattggttggcgcgcctctttgctagcctcacgcttccgttaaacctctgggatcttattgaaaagctggtgaactccaaaaccgtctgcagactttcctcgacagcctgtcacgactcagtaagccggtggtgatctacgctaacatcaagatagttgcgatctgttcgagcagagcaaactacattgtggtagcacacttctcgcgaaaaatattcgacatactaaaagtggttgcgcctgaaaaatacgcatgtcaagtatagtaatttaccattatcacatctattcgcggaacttgcagtgtggtgctttgcggaacaagtctagctacaaggtttagcggcatgggtcaaacacacagcgcgcctcccaacgaggcggtgcagttccgtcagatggtcggtcacttcaacttgtccaaatctacttgggggtggagctcaaaattcaccactgcttctgtcgtgtgctgcaggcggtggcgacgtatcgcggagacgtcgaagccctgcgacccattttccgtcctgagctacgggggctgcagatctcgcgttccacttacttggacatttgcatgcaggagcagacacacttgcaaacactcacggattctctagagcgagaggaacgactcaacgagttgcaggacgagaagatggagttcttctcggcagtggagaggggcaaattagcgctcggagatacattactgcatatcgccgttcgactcggacacgcagaagtgctggactttatgttgctcacggactaccagaagccacccaggactgcagctactccaagtactgcgagcagcgttatgagcagcgctactaccggcagagcgtctactgctaacctcgttgcaccgccacctctgccttcaaatacgccgaacttcaagggtgaattgcctcgagacgtcgtagggaccaattcttccctccagcttctactggcaaccatcgatgacgtgcacgaggtctttgggtcgagttatcgcgatgagcccaagatccaccgcttagttcggtctctgcgacgtctctggcctttgtggatgtttgaaggccaacaagaagctgctgctctggtacgggtgctctacgatgtacggacctccgacccagcttttggaggtctggtacgcgtggcgatggctgtagcagagcgattccgagtggctgtgtcacgcgatggagttcgtatcgcagttactttgctggcagagcatgatgggggcattcaccaggctcgacaagcgtggatgaaggactggagcaacgaacgcaagctccaagaattcgccgcaattttccggcgctggttccccctttccaagcagagtggccgacggaaagacgaagaagaacaagaagcgcgtatagttttctttgatgcagctatgatgacctggctgcagattgcgcaggatctacggctttttgggactgggtcaaatgctggacccgtcgagctggatgctgcagggttgaagcggtatgattcacaagtgtggcaacggcggatcagtccaccacccgcgtccataggcgatctctgcgtgcatattaattctcttgaagggtatttgagactgccgcacctcagtgtatagccagcgttgctccgttccaacccgcagatattttccaggataaattactgaaatgcttgaacatcggaagtattttcttcttattcgtgactttttttttcattaagagtacgggcgtgttgttggcacattctcccaagaccatgaagcgccctgcaggccgatcggtgagccttttgccttgcgaacctgcccaagatcctgcctatcagcggatctgcaacagcgcaccgtccagagtgatcccggatcaagacgaggactggaactgggggtctctcgaacccccaaacgaaagcactgtatcgctagcatcgaccgaagaagcgtgggctgagcgcttggctgaagacgaccaagaagctgacgttggcgatatccaagttgcagccccggaagatacaggcgtcgagatcgaggttgctgttagtgaccaaccagcagaaagagcaggagacttcaccgacttcatcgacccaacgtctcccgattcgacagacagcagcgtcctgtacagcgacagcgacgagccctccgagtactgggcgaaagcgtggtcatacagccgcagtccgctctcaaactgcagcagcctctcgtacgaagactcagacgacgaagaagatgcaactgatcgtagccgcgttcctccaaccaaagtcagcagtgatgacgagatcaagcgcctaccgcagcttaacccgtctccgaagccttcgcccaagctcacgcgcgtttccgacgttggtccaggcatgatgcgaggattgacggcgatgatccacggcacaaccagcttcaatggtccaacttctatttaactcaacctgcagagctttccgtgttcacaaagatggaacgaggacagagtgtttaccgcagtgtagcatcgtaacttttcgtaagcactgcgaagaaaagcagatcttggctttgatacaaaacgtggctgctcgaaactacagctgaaaacaggtacattcatggccctgccactttaatgggagtatccgcttgtagctacccactgtacgcgacgtcaatttgatacgtgtctgcagtgtagcctggagtgcagctgacggtgtggagaatcacatcccgattttgcctatatggatccatgagcagttccgaatatccactcaattgcatggagctaaacgcgtcagtctcgccgctgctgattcgatcgagctccttgcaatacatcgatccagccatgaacaaggaccacccttccagagctaaactcttagttacaaagggatcgatccattgccaaaggaacgaaatgtctgtatctgtcatgtaaattgatctgagtgtcggtgagaacttggtcacatttcgaggcagctccagtagttcagtcccccctacgcccaagacttgtatgccattgatctcaaagacttctggcggtaactcagcgatgggattcccagtcagaattaggtgagtgggctccaaacgtaccagagcagaggtaagctggctgtactcgatataaatgaaagttccaactatccacttggagtccaaatcgtcgggtagagacctcaaatttgtaaagtagagctcaatatctaacagtttgtgcgggaaatcggaggactgaagacctgcatacagaacgcctccagtcatattaactcgagtcaagtacagccacatcatactcgggtggtttgtgtttgttagggcagcagaagcgctccaactgtctatggttgagtcgaaaatcttgacaatcctcgcgtgggaaaagtcttggagtgagtcgggcatctcaagggacggacagtggcgaatcactagtataatcgcgttcgatctatcgaattcgccccacttctcttcgagttggtgctgcttaccgtagatacccagttgttcacagttgaggtccaccagatagcaagcttgcgctgatactccccaggggtatacttgaagtaggcattgaggtaatgctggtctaactgaagcttgggcgtgaagggcaagcacaacgacaccccacaaaagcagcaatatatacactgctctccgtaacctgcgctcagatagaatagttcgactgcaattgttagatatcggtggctccaagtcaagcgttgggggtgcactgctctttgggtgtggggtgtcacggattggcttcacagcaaccgtatcgcaggcaattcgactactcacagttggcgcgggacgtaaaagttccttcatattcgtggtagaaaacacaactccgagagaaaaaatacttcgactgactagatccggccaagaaaccacgacgatcatctgaaactcgcttatggcatgagcaaaccaatcgtcgtcgtaccatttctccatcggaaaacctgcgatctgcgggttgtaatcaccaacgtagctgagcacgacagctaccggcactatgataaaggagatgagattcaacgcgcagtcgagaaagatactggcgaagcgcttccaagcctcaccccgccacgaaaataccgagtaaatggcaaacgaagaccaacagttgagtcacaaaagatcggttcagtgtcatgcgaggaagtagccaactcattcggtaagcttgcactgactggagcgttgtctcggcaagtttacgggcgatcaggattgtatgaaatttggatccattcaccccgagaagtccttgacgagccaaaactttcccgtacagctgagaaataaaacttctgagacgaaataccaagctgccgtcggtaatttctaggccgaatatttctttggaggccttcttgtcatttagccaaggtgaatagaccaatctcccgtgataaatcgagccaacaaacattagcatggcacagatgcaatgcatcgctgccagcgtgaggttaacggcagcaatggcacgaaaatgcttggcctgcatgccgatcccgacgaagtcaaagcactcatacagaaacgtgtcttccaatccccagtagaacagagcgtaggcgagatgatatccactcgtcaccaagtgaacagcaagtagtatgcaccaccagagtgcaaaactcccacgcgagaggttaacatactcgaattctggagatactggctctgctgtcatgatcagcccggggacaaagtgcccaggctgcgtccaactggataacaatgctgccgtcaaaaataaaagtactgcacaagttgctctctctatgttcaaaatggataatgttcgcagcctaaaagtagatcgagtgtctaccgatgatccctcgacctcgtcgccctgcaaactaccatattggtagccacacttactagacacagtacacaatttcactcatttgatcaagataattcaagtttctattctgtaatctcctcgtacgtgcacgtgtcctgtggatctgacacctttcgaaccagatccgtgagaagcgcaaagtacgcgtgatgctcgatctccatcttggccagaaccgtagacgcatcagcagccgcgatccgcaactgatccgcagcctccacgaacgtcatgccgtccagctcctcgtagctccgccccgtcatctcctggaacttgcggacgcgaaagtcgcgaggcagcctgcctaccgtcacgccctcgggggactccaccgtgtcgccgtccacaatgtccgcgttcagctccgtgtccgacgtcatgctgcgacggttccagttggccgagcccacggacaaatacacatcgtcgatgatcaccactttggtgtggatgagcaggttccgctcggccttgaccgtgtagatctggaacttgtccgggtacttctctcggatgggcgacaccatctcgtacaggtacttgatgtagcctccgttggccagcatcttggtctgcgggttggcgatgaccacgaggcgctggatcctcggcatcacctccatgatggcgtccagcagctccggcacgaggatgaagtactggtcctcgacgtagatgaagttctgggccttcttgatggctttgacgcgcgcgcggaacagcgaggtctctccgcgcggggcgaactccttgtagtgtttgtacttgcagctgaaggtgcgcgtgatctggacgctctggttgcctagagtaccggtagtgttgctgctggcgtagttgagtggcgggatgtcagtgcacgttgggttctcgaagtcgagcaagtcgtcaactatcccttggctgggcagatagtccgagttccatcgatccacgaagttgttggcgacatccttggcggcaggtccatggatccgaacgtgaccgtcgatccagccttgagtcttgaaagtgataccagcggcgtctcgaagcgcgctgttgttgtggtagatggtgtcccaccggtcgttggctagatcgaggcctcccacgtaggcaacgggctggtcagtctcactcgaggattcattcgctacgatggccaaggttttctggtggtgagacgacacaacgtaggggagtcggtcgtcgaaaatgagcttcgcgtcggccccgttgatcggagacgcggggatgccgttgatgaagtcccgagccttgacgttgaacgacttgtacttgaggttgtgccagttgaggatgttgacatttcctcctcgattcacgatgtccgtgaacactttgcctacgccagtcgtggctccggtggggtcgacgtccggcttcagcgggacgagagctgtaacgtaggcgctgagcaggactcggtcgccctccttggtgccagtgaggtcgtcgtagacagcgttgtagaattcgttcgccaccgtgaagggcgtgatggcgttgccggttgtatacaccgccatgtcgcgtcgtagaatacctcctcgcgactcggtgatctcctgttcggtgaggaaccagtccgtggcatcgagaagaggctgttgtactgctgaagacgcggagagcgacgaagacacttgaaaggccaaagagataaaggcaagtacaagcctggcgcttgtgtggacgttgaccatcttggtccgagaagcgaatgtgagaggcattgcgctttgatcccaagagaggtgacaaggacttgtctattgcaaccgatagtggctgctagcaccggaccagccagtaagagatcttgagatgtgcttagagctacagctggtgatttgacgttcaacactccaaaatcggtgaaggaactccttcatttgcgaaaaggacgagaaggaggcaagcggacgtcggcaggtgcgaggccgtcgaaatgcaaccccctgctagctaggagagggtgtgcgtgtgtgctaagatcatggtatcatttgcgtgttagctggggcacagggccaacacaagcacgcggtatttgcggagggggcccttgcaccgagctttccagcgcctcgtgcagtactcggctcgctagactgcttggcgcgggggcgtccagccaagcgcagcccggcaggcaacatgttgtggtaacaagtagttggcactaaacattaaagtagatccagcgtgtgttgcttagcgcctcgaagcacttttgtcagtactgtagctacttcagactacacgcaatggtacagtaacatacagaatacagcatttagtgcagctcagccgcttgctctcgaaccgaagtgatatgtagtgtcactgtgaggacacttagacccaaggacttggcgatcaagtcctccaactcggtggccaaattgaccagacttggccacttggcccatgctcgtgctggtgctcgctcggttggttggttgctggcagcaacttgctgccaacttggttggaacgtccaaccaacatacggaaatgttctcgacaaaaaacagagtgtcagcctattcttttaccgtgcaccgggccagtcggtgtggcccggtgcaccgactggagctgacccggtgcaagtatcctctgtcattgcaaccatgcgcgtgggtgctggtacccagcttctggctctagcgctaaagcaaccccaaaaccagctggcacccggtaatttattttaaatgacgcgtaaatgacagggacacgtcgccctcgtcatggtcttgctgcatatatctctaaatttagacacgtcgtggtggcgtctaactgatgttctctacacagcaatacgtgaaacacatgacaatatgtgtcccacattttcaacacttgggagattttgagcgacagcaaaaatgaagaagaaatcgctggcacatgagctggtgcacgcgagaatcgccgagattgcactcctcaagaagaagctggatgagcttaccgagcatctggaaaagcttctggcagcgcagctacaaatccaagccctcgtcgaagatcgcgaagagaacagctatgcattagcagccgtcttgggcgatgaaggggccgaccaaggtggtctcaccgcagaggacgacgctgtttccctcgatgttctactggagctggcggtgcgaaaaatgaaagactaatgcagcatatactctgtatttaaaggtaaatacagactgtggtgtttctcagagctggttctgtagctactgatgaatctggctagctttagcgacgtcgcgttcagagagatgacgttcttgggagtaacacatgatgacccacagcattttcaatcacatcaccttgacgtcgttcttggaaattcttgaaagttgcatctgcaagctccccgtaagatagctgtgggcttgggctactaccattacaccacagctagcaaaatcaggttgttgaggggcacagatccactcaatcggatcgaagaaaagatggccacgggggtcagaagccttgtgccaccgctccacataaccacgaagcccctcctttccttcattttctttgtctttcggaattccagtccacacgatttccatttcatggtgatagtcatcatcaatgagcggctcgtacatgtatccatgcacccgaagcttgcttgtttttgccgtgtagcgtaggcgaaggataattaccccccagtggtctgcgtgcagattaacggggtggataataaatttcgttgctgcaagtgctgtcttagggagacttggccatccgatagcccatgtcagtgatgacagcacatggcacttccccaccgatctcgcaagggtctccaagcaaaagtccacagggctatcatttagccatccacgacagatccctcccacgatgttgtcaaagctgatcaggactttgttggagagcgtcacaaattcagtgcgaagtcgacttgaagtaaactttgagataatttcgttcgctagaccttggtgccgctcgggaacagcatcacgcggtagtcctgcagttgctgtctccgcagcgaaaagatccacgatggagtcaactttacgccaatcttgctccagccactttcggtccttcaaccatgaggtacacttcaccttgatcgcgtagaatcctgttagaacacctacatattgtctagaaacataagcatgttaaagcaaccctattaaagcaaccatatcgctaaagcaaccatatcgctaaagcaaccatacccgctaaatttccacagttttggatcaatcgccaagacgacgtcgagaacaagtccttgcttcttggccttttcatccagtacaattggctgcttctccttccgggtagtagtcattgctgcctgcattgataggacgaggtcttgtggaattacaaatgtgtgcatgtagtccgcaggtcgtacaatttcccaatgacaatcaatcttccgagctcgtagataggcatcctccagctgaacaggatacttcgacagcatctccatcacgcgcttcagatttgaggtctttctggcccaaatcaggaactgatccaaagtcacggcaagttcagtggggtacttgtgaacagcaagacggtcggctttgagactgatcgtagtttgcctcagctgtttcggagttgaccttgactttccttggcttggtggcttaggaactctaacgacattgacctggcgcacgcgcgactctttgtcaggcttcgtagagcttgaaaccttgtcacagctactcattccgcagctgtcatgagatttctcgtcgatggggggtcgaattggagatgactgcgaaaggtaaatgcgttgtgtcggtaacatactttcgtcggactcgtaatcgccataattcatggtcatggggctgctttccaatgcgtccatgagcgtcatagtccccattgcctccacggggtccagaatggagtctgagacaggttcagatacatcttcttcttgcttgctatcttcagcagattctgtagaactcggttggggggcagggttgacacggttgagccctatgtcgatcgtttccttccaggcacttagctcttggtagaagtctgcactagacaaatctgacaggtgttccaatagcggttccagcatcgcttttgcgtatgcgtatttttcagctgaagacaatacaacctggtttgcccgttcacctcgccgtagccgtacgtacgcgacttgcttcctagctttggttggcgaagcgttaccccccgcagcataaagtggttgttctggttcagccccagtgtcgttcggcaactttactttcggcaaccttaacttggacatctgcacaattggctgtaacatttccgctgcagccgtcaattcgtttttcacttccaaggtctggtacgaactccaccgatcatgaattgccatagctggaagcagtttgaagccatgcccctcgcgtgctaagtacataagatgacgacatggtaaatggtgactgctataaaatagacaagtacacgtccactccacatcgtgacagcgaaaggtttgattcccgcaataattttccattgtgaaggactcgacgctgtacgctcacaagtcgcatctgccatgaagttcacaaatcgttcccactcttttctcactttctcgaagatgtcagggtacagtcgagttgctaccgtcaggagaaacatcggtatggttttaggaacgggcgaagtcgaatggtgctgcgcgatgacgaacccgatctgctgagttatcatgatttgatgctgcaccaagcccgcaatagtcttgtcaattcgtgtcttgtgccccaacagtattttcacttgattccagtttgactcgatcctgttcgttgtagtattcccagccgtggaaaatttgctgcgagcaaagttcgcccacatgtctcgacacgaatcccagttcttttcaaagtacgagaataaagcttgtttcttgttgtcttcgcagtattgcttcaatgcaccgtaactagaatcgtaacctgtctctgtggagctgcatatggtttgtttccaaagttagcgttaccacaagaatcataaatagaacctgttgcgtacctgtacagcgtttttatcatcaggttgagtaactcgtcgcgttcagacaccttcagcttgtatggggcccgctgcatcaccttcttccagtacgaaatggcatggaattgacaaagttccttttttcttctaaaaactttcgcagcaggaaatagtgttttcagcaccctccactcatcgaaatctttgtcgatcacgatggaggatatcatccgccaacttgggttcttctcttggaaatactccaggattgttgtcatcatcggagctcgttggttgaggcatatgaagtctacaactgggaaccctctaccagtagcggttgtgacgaccagactccctgaaatatccaacacacaacagtaggaaatcactttgttaatacggttgctatatcatcgatatggttgctataactacgcaaggttgccgtaacaaggataaagttgctataccgaacaactcatacgcacccaagtgatagcccaaattgttcgtgccgtgagtgaaatccatcgtaatagtgtcgccccagcgctcaaacatcaacttctgcacctttgtttgcatcacgataccgcatgtcacgtccatttggtcttgaataacaaggacgtcactaccgtctaactggcggatagcttgcagcatgtctttcaaacgggcctccgctgcgtcgtgccccataatactgcggatcagattacgggtctgttgaggtgttattttgcagcctagcaaacacacaaagcgcgaacagtaacgtaagtatcacttcagcaaatcatatataaaactacgcaccgattccctcattcaggaagttcgtgatgtgcttggaagaaacactagcatccgttaaagtcttaacatcttcgagatcttgctcgtccaacggaagtgtctttgttgtcaggtacaacgatgcttgcgttcgggtggtcgggtgcgtgtgggtaaagttctgattatcaacagcgacatgtaagaaatactaacaaagcaaacaaatacacgaaaaggcagatacctcgtatcttatgacaattcgaaatttgccattttccatccgctgaacggttggtgtcatgcgtgcaggacacctgcaatagttgccttttctattgcgatgtcccttggagcgcgacgcttgcgaaacaccgtgtgtacagcggaggaccttgtgactccaattaaaacgtgaagggatttggtcccgatgattgctgcatatgaaagggggtttcgttaataacttaaatttcgcatcaaacagaggtcacacatacctgttgtactgatttcgtgtctccgagcttcgtactcgaaacttgaggtggtgcttctgcttgtatattttcaagtgtgcgttgaacttgctccaactcttgataatcgctggggtaaagggcggaacggggttgataatttctttgcgctcctcgttgatctcccgcaactcgtcaaggtgcttgcttgatcgcttccgcggtatgtactgcttgttccgcttggataaacgtggggccgaatcagcgtcgacagactcgtgaagctgcagctccgccttacgctttttcgcgaaagattgggcttcatccccagcagaaagcttgcatttggccagagcggtatctatcgattccaaagtgaatgtcaatattaatgatagcgcaacctttttgcttaaagcaactttaacgagaatacctggtgttttcttgcgtgctgtggttttctttctcggctcgggactctgtttgcgtgtcctgcgttctaaacaaactaaaaaaatacacaatacattatcagttcaactcagtaagtatcaacaataatccaaacgagtcttacccgcttctgcttcgtcttctgtgctggattctccgtcgtcgtctgcctcctgttcatcgtcactcgcctcctcttcatcgtcgtcaccctcctcttcatcgctatcgctctcctcgtcatcatcgacctcttcttcgtcttcctcctcttggtagcaatcctccgcctcttcgtcgccgttgtcttcctcatcctcctcgtccagaacaaagtcttcgtcttcgtcgtcgtcttttttaatcccgagagcggcgtacatgtagtttagctcctcgtttacgttccgcagctttcggcctaaacaatacataccgacagaattcaaacaaaatgtgaggcacgtagatactctcgttgccaccaacatggagcatactgattaccgtttataatggctccccccgcaggagccatcggtcccccctcgccgtttggtgcttgactgattcgcgagaggtgcgtgccccacgtggcctccgttcagcagcgcgattcttaaaatgagcggctgtgaggtggcgcacttaatggcatcgtacctaatcagaagcgcactttagcgtactttgcgtacctaagggcttattgtaatttagacatttaaattacgctcgtaatttttgaaatccctaaaagcaaccatacatgtctcagaatggctaaaagcaaccatacttatggttgctctaaccactcccctctagtgccgcagtcgtggccgaaaagcagggtcattcatcacgtgaggtacttcgttattaccaactggaacatgatcagggatttgaatcgtagtggttcttgcaaattgcaagttattgtgcttttcagttgttttggcgaatcggacgtgtaaaacagctacctactaagatggggctaggttatcggagcagattagcaggtccgtcgtagggaattaggaccaagaattgctagtccgatggaagcacttgcgcaggtcctacaaacagccgaaagtccgaatgtcgcccattttcacggcattcggggtttgaggtcttacgaaggactcctgccaagtcttgtggcaggactttcatacgagctgactctaatacggcgtatgtcaaacgcagaataaacttagggaaacacgatgcagtcgatacgttaaacactccagtcttcgcccttcgccttcgcgggttccggcattgcatgcttccctaaacaaagcttgcttggcttggactccaaccggagtccattgaacggaagactccgggagaccgctcatcggactcgtccgagatttgcagctcagatttagagaccgccaacctcagattaactgacctccaaagtcctacgcaggactcggcaaaatgaccgaaagacacaatacaatagagaggtttcgcaagttaaacttgtggaagttagagccgttcgaaagatttgacagagagcggccatagatttattcggccaagttctagaacgagctttcgcaacttagacttgtacgtctgtagcattttcaaagatgaactctacttacgtacaagaccttctcgtgctcggcatgctctcagaggaagaaacggtttgtctcctctctgcttgaacgtcgtccacaagcaacgtcccccggtccatttcctacggcgaacgctttaacatcaacgcgctcaacgactacgaaacacggttctactgtcgcttctggaagcgagacctatttcgcctggcatacccgggacgttatggagacttaagccgctttttcgggcggtccgcccctattgtctgcatgatatttaacttcatgctggggttggtgtacgacaagtacaaatgcctactcaccattgaatgtgggctacttacatcgtcgcgattggaggagtacgctgctgctgtggcacaacgtggagcactggagccgagatgcattggttttatcgatggcactgtgcgtgctatcgcacgcccaacgcgcaaccaaaaacaattttacaacggacacaagaggaaacacgcgctaaaataccaaggagtaatggcgccggacggactattcatcgactttacggtcctacggttggacgtcgtcgcgactcttggcttttaaggcagagtggactgctggagcgccttccgcgtgtcttacatcacgacggggaacttccgtattgcatctatggggatcctgcctacccactcaaaccaacgctgcacgtcggtttcaaaggctccaatctgagtgatacgcaaaaggcattcaatgcggctatgagtaaagttcgcgtggcagtggagggatcattcgcttatggccgtttcttgatcagcgactgagtcaaagactatatctatcacctgtggggaaacactacttggtcggtgtactcctgacaaacttccgcaactgttccaaccccaaccagatcagcaaattcttttccattaagccgacaagcctcgaggagtatcttagtctagctactacgaactagtcttgctgacgacagcctttaacatttcaataaacgcaagccgctcgtctcgctcaagttccattcgcagctcttgcagttccaggcgtcgctcctccaacgcaagccgcttctcctcgttggcgaccttcctcccttccagtgcttgagcgacttggtcgcggcgttcgagattagcaaccagttgctgctgctgcgatccaccttttcctcctcctcggctcatcccttctaaggctgcgtcgcgcatagcgctagcttgctcgtccttctgctgctgctggtccttctgctgcttcttgtcgttcttcagcagcgcctctatctcgcgcatctccagcagctccgccagacattcgtccttcggcgtgtactcttcacacggcccgcttcgtttctcactcgccttctgctttgcctcatacgcatctacgagctggttgtagcgctcgcggtaacggcgaccgtcgacgtccacttccaaagctgcagctacatcagcccaagtctgggtcttcttcccgtagtcttccccatacggatttcttgcttgagcttcctggatcagttggaagtcaagctcatccgtaaagcggaccatcgttttacgaggcttcgtcggtggggcctcctccacggggttgttgtgcgtttggcttggcttctccatagtaaagattactgggagattgtaagatgcttacccgtatctcctcaagtaccaacgtgtacagggcgttctagacgttctagacgagtcgagaacaacttgtagacacacgtctctatagaggggtagggaatgtattgtcgctaactcccacaagttgctttgcgaaacctctctaatgatgcagtactacatggaaacatcagtctacgaatatatgtgtcgattttaaactacgcatccatgctagagctgtgctggtacggcactttgctgtgagacttgctgggggggtgcaacactgccgtgtgccattctcaagcatgcccaggaagcccttagacaaattgaaaagccgtttagtgttgaaggggcatcgttccggccgtcccgtaagccgtcccgtatagcagagtttgtggtaattgtagatgcgagctgcgtcatgaaaaacaaaatcgaaccttttaaaatgttatcggtgaacatttccgaacctgtattggcaggaactacaaggtattggatgaccccatctgtaatcacactgtggtttgtgccacgtaagtggttgccgatcacgattcctatctgtctgtatctcgatgtacactttcagtgaggaatttccataaatcagtgattttcactgagatttgacaaaatgattgtgacagtttgcctgaattcactgacgcaggtatagtagtatagtactggcacgtctttacaattttctagtcagatttggaactatagtaatactacaaatagtacacgtaggtagcgtgttacctacaaaaatactatataaaatagtagtgcttggtggttatactttttgcactatacaacgtgtctgttattctgcactaatattgaagcaactttattagggtctaagcttctccactattgttttgcatctgcccttccgccgacataacccagctttttcgcgatagaacaaagtgtataagctcaacggacccaggtaatggtgcattccctagtggatggtacaagacatctgtgttatgaatcggctccggttgcagccgttagcgcacacggtggtgcgttggcgcactggagggggcgtcgcaggagcgacggtgcggacactgccctggaagaagccgaaggaaggagagacaaggtcctgggggggaggacagcaggggacaggagttgaagtgcaacgagtggttgggagctctggagacgctgcccaacgtgcatgtgtagcagtaggagtaggagctcagtctaatatctaccaagtgcgtgtcaagtcgtgcgggtgttcgcctcctcagtcttcctcgaggtcgtggcctcactgcgtggagcgaaccgaccctgagtggaacaatctgtgccggctgaatctttatttgcggaaccacggacggcctcaggcaatgattcacttcgtcatgtaagttatgtactgtagttggttaaggcttactgttgaggcactccgcaaacatgttatcggtttttcaccctaaacgtgttagttgtttgctgctatcgctagaattcaaattaatggcccctcaagcgaattggtattagttgtcgagtccgtatcttcgcaccacgagtaatctcgtacacgcggatcccatgattgccaattcctacacaaatcagtgattggtgtcgaggagaagaatttcgcattcaagtcagtactttccgcaactaactgacatgtcaatacgctatgtcgatctggtccttgaagagctggaaagagccgtgtgcgctgtgctgcatgaatctaggcgggaggtacagatacatgtattaataatatgctagtaccgaatttgttttgtagagggatacaccctaccggagctaaaattcggacgcccgattttgttcaaaaaatgaatcggcaccggacgcccagatgcatttatcaaaattactaaactgatactctacctcagctagatcgaagtctctataaggccgaatctcaccaacgcggctgccgacacaccccaacttattagctcgttcgccgtcaccgccgcaacttagaacgccgagtgaactttccgtttgttcctgccgcagacagagctatagagctaaacgacgagcccaacatagcaccatactcttttcccttgataccggtactgctctgtaggtagacccggaaagaacgtatctagagtgaagcgaaaattgcagtgtagtctcagatactcgacagcagccttcttcatcgcagcagtgtaaacaggttggacccgcgtcgttttccaccttccttggcctccaggcaggcgagggcgacttggtggcgcccgcgccattgcagaaatgatcgcacgccgggcggctgagagtgcaaaaattactggcttggacaggtgtatccatccctcaacaagtcaagcatcttgtatcccatacgtggatgtatccctctacaaaacaaattcggtatttccactatccgtcttgcctcgaggccagcccagctcagagtggggctggcttcgattccgtgtgtgctgtattcacggttaaacttcgagaaaaaatcaaagaaaattgcctctgcagaattccggcaatacgtactctgtcagcatcgatgtcgccatgatctgaccgcagccacaaggacaggaagccttccgaacatcaacgtcaagcactaatcttaggccagccacttgcattcaacccatgaaaaaattcagctctaaactgggagatacgtgcatctacttctttcctgttcttatgaggagcgagctggtccatcgagtttgagccccacaagcacaatacgtacagcgcaggtttgccacttttacctccattcatcgcgcgatgtcggataataccaacgcagaagtcgagaacagcccaacgactcctccagcagcagtcgaagacgccgaaacctttgacgacccaactgagaaaaccacgttcttccacggtgtgaacctgcgcacgcaaccggtgctcactaagcgaggccgaaagactggcaaaatagtatcgcgggttttcgttatcttggaaggtgcgtgtgatatttctttgataaataatgtgtcaattccactaactgttgagggcgtacgtactgtaggatatctcttttacttccagcaccccgcagctccggcgccatgtggtgttttagcactgcaaaatgctgaatatttcgtgcactcgtatgcgtcttccgcactactggggaacttctgcattgagcttcgatcgcccctcagagcctggggtaagtttcgccaaaatgtttaccttcatcaccacccccttaccggaaattttggtgttccaggtaccctcattctccacttccatgggtatacccccatggcaatccacgaaatcaagcagatgatgaacgccgctggggcgcatcctcgacgcaaccagttcgacaagaacggcgtcgagatcgagaacagtcgtcggagcacgaagcagcgtcgaccgtctcgcttgatcactctctccagcatttcgaatctcatcccgcactgggcgcgacgcaatggagccggacgcaacagtatgagtggccgggaagaagacagcgtgttgatgctcgaaagcgagaccgagttcgatgcagacgcagataacgtcaactccaacagcggcgcagagagtaatacggttgtctgccgggtcacaagaggctcccggaccagcctccttaaagtcaatttgcgcagtacgagcatcggtggcgagcctagcgatggcaacagagatagcagacgccccagcaatcaccagttcctccagctgtgccaaaatacccggctatcgttcacgcaacgaggtcagccacgtcggcacttcagtctggacgaacaagaagagctcgtcgcggagcaggacatcagtccagagcactgtcacgagctgtgtgtcaatggctttgtggagaacgctggtcgtcgactgttccacttcatctggccctgggagggtctccagcacctccgtccgaaccgcaggcagagtgacgcagcgctacgtttctcggtagtggtccagagtgcaaaccaaagaacgcaggggcctcgcattcgcttcgtatcggcctttgaaccatccagacagtttgacgccactactatggcgatgatgaggcagtgggtctcaccgcagcaacagcagagacttgctatctgtgcggctgatgcggctacaaccagagctgcagtcactccacgagctgcagagcgttcagtcagcgcctccagcggtaccagcgcgagaagaaatagcatcaacgtcgcaagcttgcagatggcactatctcgcctgcacaatactgacactcaagcgcccgcagccgtcgctcctctggactcgaggagcttctcgctcaaggtgattccgccgatgacagcctcctcgaacgtcaagagcggtagtcctccaaaacttgccacgccttcgaccagtcccccgaaatctggtagccggttgccctcgccgacgtcgatcatgtccaaggccaaggccatggcacaacgagcagcgtcacccaccacgcctcctgctccatccaccccggctgctgctgcagctcctactgttgtgaaggtggctagccaaccttctccagtgaagaagggtcctgcacctgccgcgtccgtccccgttgtcaccgacattcgcctagtacaagctgtgagcatcgcggaaagctacagtggcggatatatgctgcggcagtacgagccgctcaaggtcataggccgtgggggcttcgggcatgtcatggtagcgcgacatctaccttccgggtcgttggtggccatcaagacactcagcaagcgcgccatcgccacacagaatcaaattcagcactcccgcgctgagaagacagtgctcacacgctgtcgcgaccacccgttcatcgtgaagatgcacgcgtgcttccagaccatcgaccacttgcacatcgtactcgactactgcccaggaggagagctgttcttccacctctcacagcgtggacacttcaccgagcccgttgccgccttttacttggctgaagttctgctggcgctcgagcatcttcaccaacacgacatcatctaccgcgacctgaagcccgagaacattttgctggaccagcaaggacacgtgcgacttgcagacttcggactctcgaagcctggaatcgacgactggacactcgcgctgaccttctgcggatcaaaagactacatcgcgccagaagtgctcgcacttggtgaaagaccatcttcatcgtcgtcatcgacttcgtctccaccaggacgagggtatgggaagtcggtcgatttctgggcgcttgggtgtatgctcttcgagatgctgaccggtcagccaccgttctacaacgccgtcagcaggacgcagctgtactcgatgatcatggacggcgccgtctcgttcccgcccaacatcagtgacgaggcgcgcaacctcatggagagtctgctgcagacggatccacgggaacgacttggagcgcgccgagcttcgggcggcggcgcgactgccgtgaagcagcatccgttcttcgcgaagcaccacatcgactggaccaaactgctcaaccgaactctgcgcgcgccaccacttcgccctcggtccggagcattcgccaacttcgactccgagttcacctccatggcgcttcgtggcatcgacagcatggtcaaattcccggagaagatccccatggactaccagctcttcgacaactacaactgggagccacctaaatccaccaaatagaacacaaatacaacgacaaaaagcacgcccaacatgcaatcaaagctcattcgattctgcaaacgggacgggtcgccgcacctcaagcatgcaagactcatggttcgcccgccccggtcgtcttaccgctccttcgctaaagcgttagctagccggcttgcccgggcttcgcttacttccacagcttgttgatcgacatgttctgctccgagtccttcttcatgaccttggacacagccatctcgaagtcctcctgggtaacgtggatccggcgctcacgcagtgcaaacataccggcctctgtgcacacagccttacactcggcgcctgacgcagtcggcatcttctcagcaataaccttcaggttgatgccacgcagcaggttcatcttcctcgagtgaatgcgcatgatatcgattcgcgactgcacaccaaatagcacaaaaagttaaccatcccatccacaccttcagcaaaactcagccatcaagcgcactcaccccttccgtcgggttcgggaactcgatctttctgtcaatacggccggggcgcagcagcgccgcgtccagaatgtcgatacggttggtagccatgatgaccttgatgttctgcgcgggctcgaagccatccagctggttcagcagctcgagcatggtacgctgcacctcggagtcgccaccgccaccctccatacgggagctaccgatggagtcgatctcatccatgaagatgatcgacggcgacgcctcacgcgccatgacgaacagctcacgcaccatacgcgagccctctccaatgtacttttgcaccagctcagcacccgacacacgaatgaacgtgcagtccgtgtggtgggccacggcacgagccagcagcgtcttgcccgtaccgggagggccgtagagcagcacacccttgggctgggccacacccagagcgtcgaagagctccgggtgcttgatgggcagctcgatgacctccttaatctcgcggatctgcttgtccaggccgccgatcatgtcgtaggtcgagtcgggcaccttctccaccttcatgaggctcacaagcgggtccacctgcatcaatagagacccatataaagtttagcgatcctcggtttctcatagttgatatgtcttcaaggtgacggacgcaccttggtgggcaggatcttgtgcagcacgtagctgtcgttgcgcaacgccacgcgcgtgttgggcgtgcacttggcgatgtcgatggtcttgtccacgtccaccacgtacttgccctcggggttcaccttgaccagcaccttggacttgcccatctgcttcaccacctcgcccacgtacgagccgggctcctgcagcagctgcagctcctcgcgcagcagacggacttcatagttgatacaaaaaaggagagaaataagaaacctataactttatacaaaaagataaagaaagagaagaagaggaggagaagaagatatctatctatcttacccttcgagttgagctcgttgcgctgcgcctgcagacgccgcaggttctgcgtctcgtcgcgcaccgtcagctccaggtgctcaatcttctgctcgtagtagctcgtgagccccgcgctctcgtccgccgacgccatggccacgtccgccgtcatgatcttcggtgtaataacgaggagaaaatcccctttcctctccctttgtgaaaggagatccaaaattcgtaatctggtgtgtgtacgtagtttggtgtacatcgtacaccaatgatcccgatggccactggcactgtagccatctcggaatttggtcacaaggtgcaagtacataggtagctagctgcaagaggatggtggcgacgcccaggttccacgtgacgcaggacgccgcgtgggtcttcgtgcacgtgcacgtgccgttcgtgcgcgtgtccgagatggagttctacgtggacggcctggacttcaccttctactgcaagccgtacctgctcaagctgcacttcccgcacgaggtggtggacgacgagctggccaaggccgtgtacgacccgaacaaggtgcgcaaaagctgcagctgtggctgctgcaattggttcgcaataggttctcactagctgtgctttgattcttgcaggacaacggcatgattgtggtgcatctgcccaagaaggaggctggccagcacttcccggacctcgacatgctcaccaagctgctgcagtcacagcggccgccggtggatgtcaaggcgaaaactcaacggtgagatttgcaatgatgatggcggtagtggtggttgtgtatggaatttgacgtgatggtcttttatcgacaggaaagcgccactgatcgaagtgttggagtcgtcgggccctggaccgattgggaccttccaggaggagtcggacaggttgaatgcgttgatcgacggcaaaccggttcctagtagtgacaatggggaagcggctgctgcggagctgaaggtggagacggactcgtcgcttctcggactggagacctcggcttccaagcagcaaagtcccaaggcaattaagcttggcacaggcaaggatgacgcagagccggttggcgtgcgcatcacggagctggcgccttcgtacggattcaacaacgcgtacagtgactttttccgcgtgtggcacggcgaagtgagcgaaatcttgtctctacccgacccggagcacatgcaaccggagcagcgtcgtactctgcgcgaggctgcggaggaggcgcaattcgacatcgagcggtatctaatggacttcgcgaatcagggcgatgacatgtacttcgagctgactatggcgtacgagccgttctggaggaagtaccccgtcctcccgcaacctgctgtgactgctccaaagaaaatcaccgaggtgaaggtgacgaagcctctcatcgtcgaagttgattcggacgttgaccgtgttggagacagtctcagcagcgtgtcgctcgaagcttctacttcttcttcatcgtcatcatctcagccgccccctactccatcagcgtcggagtcagcgactacattcacggattcggagcaagaactgctgctccgactgccgcgaaaggagtttttgcttccggaaggaagtcccgaggaaaagctagtgattggtggtctggtggatatcctcattggctttgcgtacgagcagctcactacccagggtgacagtggagtcgagtctacctggacggtgggcatcgtgagcccaacactgtcgtggcttgattcgaacgcggatttgcgagccgttgtgcgttcgactgtgcgccgcatgatcacattcccgttcctgcggcagtacgctctggccatgcgttgcgtgcgtgaagccagcgagatcctgaagcgcggcaagcgcgtcgtgctgcgagctcttcttgctctctaccggatcgtggagaagtccgagacccagtacctgctcaactcgctctatatccaggactattgcgtgtggattcaatccgtcaacgatgagcgcctccagcgtgtcagtgcggagctggatgaccacatagctgcattcaagaaggatgaaacgggttgggcgttggacgagctcgaacgcagtctgttcgaggctggcaatagcgagcacgacgaggcggcatcttcatcatccagttcggactccgaatcgtccagtgaggaggagtcctcaagcgaggaagaaagctcgagcgatgaagacgacagtgacgctggagaggaaccgaaccaagacatcaatagagtggcagggacttctcagtgaagccttggacacgcatgaacaagatagacttacccggagcaagcagtgcgtcatgtataattagtggagcgaggacgctttcaaaaatacagctccggtgcatcatgctctgcatttgactcgctacgctcggctcggcttgagctcgcgtgcgagtaagttcgctacggctacatggtagctaggctcatggcaaaccaagacgaagttcgagcagcgagcttgtcggggccgctgtcgtcagccactgcctccgcatcggggctgaagctgccgttgctactcacagcacgacctggaaatgtgggcgtccagattgacgcgcatcgagccatgaacttgttctcccatccgcgcagtgtcaagttcacgtcgcagtttcacggaatgatgtatgaaaatgggtcgctggagaattattcgcgcgtcgtggagcgcacggctcaacgagctcgactgctggaggataaactggaaaagctgcgagctcgggaacaatatctgctggaagacgaggccaagcggaaacagcggcgtgttcagcgcgaagcagctcgtcagcgtcggatgtggcagatgcaccaggcagcgaagcgagcagatgaacgagcacgggaggatgccgctgcggtcgcggtgcaaagggtgatgcgaggggctctagcacgacaagtcacgcgagtactcaagaacgtgcggaaaacgaatgacgctgcatcgatgctgcagcgagcgctgaagacgtatgtgtgtcggcagcaattgctgcgtgagcgtgaacgtcgagccagagaagaagaagctcgtcgagagcttgagatgcattcagctgccgcggtactccagcgacaggcacgaaagcacctgcaaagggcccgaacacgagctgcattggctgcgtgtaccgaagctgaagaggttgatgacgagcacgaagaagtgactctcccaaagccacgaaagcggccagcttcagccgaagagcttacgtcggaggagaagatcatcgttgaggcactaagcagagggatcagcttggatatcctcttctccgacgaagaggacagcgagagcgcgctaccgaccaattctacgtcgtcttctagcattataccgttagaaccgccaacgtctcccccaaagatactcccgcagccaccaccgcctaaacccactccaggacgacggccgcgacgaccgatgtccatcaagcgcgtcggcgggggctaccgcactaagctgctaccttacgacgccaccgagctgtctcctcctaaagcagccccctcaaacccaacacccgtaacaacccgcacctctcgaggcagaacgtggccgcatggaggcccaccggcaggcggcaccagcgtaagtgaggagtttttgcgccattcaagacgctccccaaccttcccaaaacctgcagtatcccccaggctgctcgcttcacgccccgccacttcaacgaaatgcgacaacgacgaactacgagctgcctcgcccacgaaaggctcgccgcccaagatctcgccctacgccatcccgcagcgcctgcctccctcccggtaacaactacaatgtatccatctcgtcacacgtcgcatgtttgttccaaatcaactattctaaaatctaaatcctagaagtctaactgcttcgcgcgaccttcgcgcaacctttgtatgacgggctgctctgctccagtagtaccatcgcccgagcgccagccaattcccatttgccgacttcccgtggccatgcagctcttcgccgactcgcagacgcacttcgcggccgtgtccgaggacggccgcctcaagctctgggacgtggccggcggcgcgctgcagcaggagctcaaggagcgcgaccacctcagctaccgttacacgtgcctggcctggacgcaggccaatgcctccaccagcagcagcaagaagagcaagaagcgcagcggcgccagcgacctgggactgctggcgctcggcaccagcaatggctcggtcgtggtctgggacctggccaccggagaggtgaagcacacgctgcaggcggacgccagcagcggcgccgtgcaggcgctggccttcaacccgcagggcagcctgctgtactcgagctcgagcgacaagcacgtgctggagtggagcgtgagcagcggcagcgtggagcgtaagttccgcgtgggctcgggcggtgcgtcggcgctcgccgtgtcggcggacggcgagatcctggcggccggcggctcggcgctgcgcacgttcgacctggcctcgggcaagaagagcaggaagctggtctcgggcctctcgtcggcggtgacgcagctgcgtttcgccgcggtggaggacggtattgaggcctcgcgtttcctgttcgcggccacggccggcgcgcgctttgtcaacatgtacgacctgcagctcgcggagcacgacgcgcccgcgctcaccttcagcctgcccagcagcgcggacggcctgttcgcgcgcgcctcggtgggcgaggtggtggccaagaagaagagcaagaagagcaagaagaacaagaaggagaacgcagaggaggccaaacccgttgtggacctgctggtcggcgccacggcgtctgcgggcgctatgttcctctggacgcacaagtaccagcagatgaaggatgcgtcggagctggcgctggcgtctaagccgctctcgcccacgctgtcgactgaggctagcgccggcattctactcgccgagcttagcacacaggaggaccagaagaccgaggtgctggtggctcgcggctcgctggtgaagcccgtgttcgagaaggtgtcccctatggaggagaacgctcctggtcagtggaagaccgagcttgagtttgcggagatcagtgacgctctgctgctcaaggcggagcgtgccgaggctgctaccaagaacggcagcaagcgacagaaggtggaggatgccactgccgaagatgaaaagacgcacgtgccgacgctgactgagcgtcgcgcgctggcgaactccatgacagtcgtggatgaaactaccagcttcgaggagctggacggagaggcggacgaggaggagaacgagctcaccttggcagagcgtgtggaggctctgcgtgagcgtgtggagagtgacgtgaccgccgctcttaaccgcgccgagcgcgaggctgagacgcctgaggacaaggctcgcagcggcaagcctgatgcgtcgtcgctggccagtgtgctggagcaggctctgcaggcgcgcgacaacgctcttctcgagtactgcctgcgtacgcgcgacgctaagactgtggttcgtactgtggctcgcgtgtcagcctcccgtgtgctgggcctgctggaggtgatcgtccgcaagcttgagcgctcgcctaaccgttttgcgcgtctgtgcccgtggctgcgcgctgtcctgctgcaccacacggcgtacctggtggcacagcctgacctcgtgcccagtctgtcggctctgtaccagctcctggagacaaggttgcaggtgcacgagcagatgcagaagctcgccggccgcctgaccctcgtgctgggccagatccacgtcaacacggccgctaacaacgaccaggaggatgacgagacccaggccgctgttgtctaccacgaaggcgaggaggaggtgcgcgaagaggcggccgacagtagcagccacgaggaggaggaggaagacgaagacgaggacgacgacgtagagactgaggacgaatgatcggatccgtggatgtattaatactctcaatagaccagaacagcgagcctcgcgagagtccagggccttgctagtcatttgcttttcatatccttggagcgcgcatcccatcaagttgaagtcacgtcaagttgaactggttgaaccatccccaatgcagttgtcgccaacattatgccgaccaaggcatctggatccagagcgactacgggccaggctcggagctcaaaagtttgagaagctgcgctaccatgaagctgcagttgtgagcacagctcccatgcagttccagttgtttgccctgagcagtgacaccctgttcatcgttccgttgatgggtcgaggcgaatcagccgcggatatgctcttaccattacggaatatctcctcggtggatcgggtggtgcctgaaaacaagaagcagcgcggacttctcctcctacctacgagtcagctctttcgactgcaactgcgtgaggtgacatccaaaaagatggcgtcagagttgttctttgcgactttcgagccgcaaacgcagctcttctttcaactatcacgggcagtacgcatcgattttcaggtttgttcacgcttacacgaaggattaagctaacaaaggggtcagatatctaacttgctgtgtgcttcggattcttagaagcagttgatcccgcagctacaaattgacgacaatcttccagcccgggcagagcatcgtctcgaattgtcacggttgctagagatgctagcgttggatttagtccgtgctcgtgacgatattgaacggatccacctgctcgatgagcttactgctgccgcgtattcctccgtcgacttgaagcaattcttcttcgaagaccgcacacaagtgcagggatctacaggcctagcagcgttcttggtccgtcagctttctcaccctctgcgtccgggtaatggcgatgaaacacgagtcgagttcatactgagtgtcgtacgggtgttggatgcgatgtgctttgatatgcaacttcaaacaagctgcctgggtagactctgtctgaacgagcttgcgggaaaccttctcgctcgcggagccgagagctttagcgttggtgtcagaagcgatggtgggtcaattgatatgcacatgcgcgttcttcgagaggaccttatggatgccgaagccgcgttgctcctgtcgcttgatgcgatgcagcagtgcgaagattttcgcttgcaccagcatcagcagatgcggggcttgttggttgagcggtccacgtctgtaatgcagcatgcgcttcgagcaccggcgctgagtctgtggatatccaagctcttcaaacgagtctgtattgcagtatcgcgcgcggcgatcgctgtcgagaaccgcgaaacagaggaaagtgatgatggcgaagtagatgaagagggcgagactgatgaagaagaagacgagtccgatggcagtgaagctttggaaccgctccaaatgctttcactctggcgcagcgtgactgtattagagcttttggtgaagagcgacgttgctgtgggcagcgatcaagtgctcgggcagcttctacggactcgaaaggactacatagagtacgtatccccgtgtttcatcacttctcataggaaatatactgacacggcgtgttatgtgagcagcatgtatctaagagtaccgcgtttcatgacagcgttaagtaccagcgggatccctcacctagaagatgtttcgctcaagctggcaagattcctggaatcacttcgagagagacgaaaggcatgaggattttgtagacggaaatgcacatatttaactaggaagcacctgcaagctatcaactgctatttgtccatcggcggtgggtcttcagcaagcaacagcacgcgaggaagaacctcagccaagtgggggttctgcttttgaagcattgcaacgatggctcgaaccttttcgatgccttctctcgccttctccagagcttcggtcgcctgggcttcattcgctggaccgttggtcactccgcggcaaagtgagtcgaaccgcttgatcatgcgcagcttgcgagctgctgcgtcgatgtatcgctgtttgtcgtagagggaggcgttaatcgctcgctgaagtgacaaccctcgctcttcgtccaccttgagctcagccgaagccttttcaagctgaaaggagacgtcctcaccagccacgagttttgcgcgaatgctcttgtcaagacgagctgcatctcgctcacttttgcggagctgattctgtaacgtggacacttttgctgttagggctgcaaaggtgagctcagcctcctgttccttcttgcttcgaccacggagtgcgatgaggtcgcgtttgtgaacagcttgctccatgtcctgcagcatttgctcttggctacgttgcagcgcttccagccgcagacgcatgcgatggatctccttttccatactgcgtgcctctgcctggccaacttcagggtctagagcagcctgagtctccttctcgagctgaatcttcttctcccagagcatgagctgtcgctctacctccacgacgcggtcaagcagttcttgcttctcctgacgcaacgtagcagctcgagcttccatcgccacggacgtcgcctcaagttctcgcagttcactggcaaacccaagctccagcgagtgattactgttcaacaactcatcgtggcgtgaaccttgtcgagaaatgagctcgttcagtcgccctgtgtcggcgtgcagtgacgcgataccattcgagagttctcgaagctcgcgctgcatttcttgcagttcatgttgcagtcgaagttgtttttgctccaagacactcgtcttacttttacgttcttggttgcgttcactcagctcctgagcctcgctggctgcgtgcacgagagcagtctgggtgctgagccactgcttctgcttcgacacgttctcttctctgtctatcttggtttcacgcacgaggttcttgattgtcgcctcgagcggaccggtgtctgcatcctccattttactcacaagctgctcgtacttcttgttgaggcgatccagacgtagcatcttcttctcgatttcatcattacgctgtcgaatctccagctcggcacgctccacgcgctggtcgtcacgcttcagctcctcgacaagggctcgctgagcttctgcaagctgcgcggtgtggttttggacgttgagcgcgtcaacacccacccgagccatctcattctgcaggttggccaactccacctctttctcgtgcacacgcgtgacaagccgttgggtttccttggtgaggttgtgcgccgccttgtgcactgtagtctgatcgttcttctccgccgcgatttcatcttcgagcaagtgccgttcgcgctgcgtcgtctccaagtgctgagccacttgagcagcttccgactccaacttcttgccctcagctgcagcagaggagacctgcgcttccgtctgctttagtgatttggctagtagttcgtgacgagctgcaagtcgttcatgctcagctcgcaggttttcggtttgctcctccacaaaacgcaattccgcattgaagcgctcaatggtggcgatcagagtttcatgagcttgctgggccttctcgatcgatattttgtagccgcgcaactcggcacttagcgcgagttcgtcctcgcccactttggagatggccgcttgagtggcctgtagagctgtatcgcgctgctgcatgccaatgagtgcgctcttccactgctgtagtagctgcttcttctcgaaggcaacagcctccatctgtgctgcagcttcacgcagcgtctcctcagcagcttgagtctccatccgctgtgttttgagctgggctgcattggcagctaactgctcctgtagtgtcttcacctgttcgttcaagcgatcgatgtacagatcctgcttcaccttgtccttctccgctactgtcatcgattcctccgccttctctgcggcgcgctgggtgcgagcaatttcgtgcttcatctcttcgttgtacttctccacttgacgcagcgttgcattcaacgagtccaactcggcttgcgttttgtacagatgcgctcgacggcgttccaccgctagcttcttctcctccgcgctcgctttccactcgtccagcttatcctcactcgagaaccgttcgtcatgcagggtcgtaagacggcggtgcgcgccctcgagcgccacctgtagctgtgcaagttgttgttgcactccatacaacgcaacaccgacatcttctcgcgcagctttggcgcgacgcagctcctcctccttctcacgcagctcgagcgatacgcgctcgtcgttgcccacgagctgctcgtacagaaccttctggatgcgctgcatgcgctcatgacgccccatgtccacgatcgtctgcgtcaggtcttcgtcctcgtcctcgtcctcatcgctgtcgctgtcgtcgtcctcgtcgctgccgtcatcttcttcttcttgagggctcaaggcgcccacctggtcgtcaccttcgctctgctggccgtcgtccagctcgggatcatatacatccttccctcctgtatccacgccagcccccgcaggcccttgctgctctgcatccgccatgctgtcttccctactgcggcaaggtcacttcaatctgttcaacgtcgtttcaagctccatgtaacggttctcacacgtcgcagattttatgatttccaccaatcacctctctttaacaacatccattggctgaaaatggtggtcggattctagaagctgacgggcgtaggacgccacacgatcgggcccattccccaacttgctgagtcactacgtagccatggccatgcgatcggtgctgcgctcggcggcggtgcgcgcggcgggtgcgcaggcgcggcggccaacgacgctgtcgcttggagcgtcttcgctgctgctggagcactgcgcgccgttccacagcacgcgcgccgcgatggagcccacgaagcgcgacttctacgacgtgctgggcgtctcgcgcgacgcgagcaagaacgacatcaagaagaagtactaccagctggccaagaagtaccacccggacacgaataaggcggacccggacgcggccaagaagttcgcggaggccaccgaggcctgggagatcctgggcgatgacgacaagcgccagaagtacgacgcttatggccacgccggcgtggacgagcaggcgggctttggtggcggcggtggcggcttccacggtcagggcttcgaggacattttcggagagttcttcggcggtcagggcttcggcggacgctcgcgccgcagcgccaaccaaccgcagcgcggtgcagacatccaggtggacatcacgctcaacttcatggaggcggtgaagggcacgacgcgcgacttgaacatcacggccaatgtcgaatgtgactcgtgcgacggatcgggcgccaagcctggcaccaggaagaaaacgtgccccacgtgcaacggttccggcgtgcagatcatgcagcagggcttcttcgcggtggagacgccgtgccgtcgttgccagggcgaaggatctatcattgagtctccgtgtggcaagtgccgcggcaaaggcacggtcaagaagccgcgcacagtcgaggtgaagatccccgagggtgtggaccagggcatgaacctgcgcttggcgcaccagggcgagcctggccagcgcggcggaccgtcgggacacctctatgtgggcatccacgtgctgccggacccgttcttcaagcggcgcaagacggatgtgctggtggatgtccccatttcggttgcgcaggcggtactgggaggcacggttgtggtgcccacgttgacgggcgaagtggagatgaagatcccgcgcggaacacagcccgatacggtgctgcagatgcgcggcaagggtatcaaggagctcaactcgaaccgccgcggctcgcagctcgtgaacctgcaggtttgcatccccaagtacgtatctgctattctgcgatggagtaatagcttggcggcattcaccgttctaactttaaccgtcttgatgttgtgctaaacgcaggaacctgtcggctcgccaggaggaactcatggaggaattcttgaaggaggagaccgagcgcgcggagaagggtgaagacccggacagcaagccccactcgttcaccaagtcggtgcgcgagactgtggatcggataaagagttttattaagagctgcaagacggacggggacaagtcttcctagatggaaagtaccgtcgtcagaacgcagcccaagtgaacgaaggatgtacagtggcttcggccctcgattttgactgctgcagggctttcgcgagcgtgtgtttcggccaaaacagcgagcctctagacgtattcaatgtggccgctgcagagagaggcaacacgaagaccatgaaccaacagtgaacaaatgtgacacaaattcaagcatacgtgcaatgtagactgcattgaaaatgctcttctagtgctctgaatagacaacttggtagaatgatgcaaggatgcttgcagaccccttggtacagaagttgactgctcagaggaggaacacgtcgtccttgggggtcttgaagatgcgcatgtgcagtccggggacgtccagcagctcgttgatctgctgcgtgcactcctggaactccttgctggccagccacgtgtcgaagtccttcttggactcccactgcaacatgcacaaacacattagaccaaagagaaccccgtcgaaggcggcggagtatgaacagttgttacctcggagaagacgacgtatttggtgtggtcgtccacctgcgcgtacgtctcgatggagaggaagcccggctgcgcgcgtaccgtggacttgacgttctccatgaggcgcgccacgcgcggctcgtagccgcggctcatgatgcgctcgcacagcactcggatgcgcccggaactcatgatattgacgactgctgcggaattggggatgaaggtctctttggtgtcaaggcattgaagtcacgctaaaactgcgcgatgactggattttactataccgccaaaaaattgcgtacatcatcaaaacattttcgatgatgcagggcagaacagcgaagacaatctggttgaggttgtcttcactgcaagctgcagcactgagtgcgcagggtaaagtaagatgataagagagaggaggcagttgtctaggagaaagatctttcaacgttaatacatgaaaagccgtcgacgagctgttgcagcctcaagtcacgccgagctgtggagcacgcagtgaagtgttcccgtgtctccttgaaaaagcgtgccctgcaatccatcaacttaacgcctccagcacgtagtaacgtgcttattgaactcgtgccttgcgaatttccagcgagagtggcgcaactaaatcaacacacgtcctcgagttgttagtctccgtccgagtttggcactgcaaccccacacaacaacagcagaagcatcacgcacactgcacacacctgcatcgtcttcgtcttatccgccttacagctcggcatccttgggcttggccgtgaggtagtggaagcctaccacggataccatgatgaccgcccccaggcagttcacaaacaccatcagcgccgcatccatctcgtcgctgtaagacgcacacgcaacagacgcacacagcaacacattagcgacgcgatctaccctcttagcgctgcactccgctcgcccaagcatcggcgagaggcgacacgtacttgttcatggtgcttccgctctcgttgtatcgtggcaatcccaattgagacgcgtagcatattgcgtgtcgcgcgaaggtggggtgatgtgtggtaaacataaagtacgacatcgttgaacggataccgtgcggttgagatctgccagagacgtttggagttgaagcgttgatgggcggaaccaagacatcagctcaaatgcaaaccaggcagcgcatggccattacgaggcaatgaaagccccgccccgctgacagctcagccccgcaaggcggcgacagtatccactacagaattctgcccgaataaggaacgggtgtacaactaatagcctcacatatttaatattattttccagtcgatgtggcgatagggggatgtgcaaggtactgaggtactaaggtgaaaaatccagtgccaatcatcagctctccaccctcgtttgaaaaatggcgcgcatttagcgatcttactagacttcaaactacatgtaccgtagtggtagactcgcacttttgcttttgcacctcgccccacaagcccacctcctcccccactccacccatgaagtccacaccgtccaagcgtctccgtctcacttggtctgagaaagtgggcatcctcgacaaggcagcccgcacacctgctctctcctacaggggcctggctgagtgggctatgacggagttcagcctcccggccgccccaggcaagacaacgatatgccgcataatcaagtcaagtgcagtcctgctggggcggccgctggagaaggaccaaggaatcattcattgcattaagcgacacattctatcccgcaagatgatgcaggctctagaccggcttggtgaagggctagataatccctacgaggtcgaccagttgacagcgctgttgtggtgcgaggatgcctggtcaaaggttggtgcttcgaccatacgccactgttggaatcattccgtactcgttggtaaagctcagttcattttgaattaactaaatcagacattggaaaagtatactcaacttaacatcaatttatatattctgcgtctttatatatcaggcgttccttactcgggcagattactgtacagtgtgtatccaccgcgcgcgaagtggctacagggtttacggcgcgatcctgaagctttgcaactcgggccgctacaagaggcaagctgaagcgatatacgcttcgcgccgttctagatcgtgctggtcgactctttggccgtttcgcgcgctgtacttgttgccgctgctccttgccacttgctgccgcgagcgagttgttgccttttattggtctgctctggcaagcccagctcttcgggggagagacgtcgggcgaaatagaacccaggccggaggtgatggtcttcatggctttcgtggctttcagcactgccgggctgctgcgatatggtgggggctgtcagagtatcgcagtgggcagcaccacccgccttccagaactgatgaccgagccgcagcgcgttgctggaagccggcggcggcgaccagaactcggcccaaaatacgatacgcacatctggttagagctattgatacgctgcggctgcattgcagcctgcaaggcgatcctgcaagcgagctagctcgtcttcagttccgaaacagcagcaggcagcgcctgctcagtgctgtcaggcgatatactttactgcgacgtttacggggcccattacgccacccatccaacgcgtgcatagaggctgcctccagcaagtccgccccgagccacaaggaaagcttgcctcccgtcggcacatcctttctcccaaggctgcgcgcactgcgacagcgagctcattcggcaacccaccgcccagcgctcaagccatctgtccgccctaaggccaaagcaacttcaactccgactaccgaccaccgccgacatgtcggacgcgagcatccagtcccagcgcctgcagcgcgtgtacgagaccgccaagaactcgctcaacatcagcacccaagtggcgctggccggcggcgttgccgcgccggccaccatgtaccacatggacatctccttccgcagcacgcgcaacaagtggagcatcgccaagcgctactccgagttctacgccgtgcgtcagcagctgcgcaagttcctcaagcagtacaagcagcagctcggcggcgcgccggccccggcgccgctgctcgcgctggacaagaccctcgaggccgccttcccgcgtcgccacttccgctgcgataacaacatgatcatcgccgagcgcagggcggcgctcgagaccttcgtgcagtcgctggtcaaggtcatctccagcatccccatggcggctgacgtcgccgccgcgactacgaccgagtctgctccgacggctgaggccaagcagctggttgcactctacgctatcctgcgcgacttcctcgagtacccggacaagcagatcgagagcgagaccaagctcaagctggccgtgctgtcgctcgaggacgtggtcgtggactcacatagcaacctgctcgtgagcgtcgagggcgttagcaccagcgagtgctgcagtatctgcctcggcgagtgggacgacgaggagtgcgccggcatgaacgtggtcaagctgccttgcacgcacgccttccacgaggagtgtctgctcgagtggctgcagggtaacattcactgccccatgtgccgcgaggagcccacgacccgcgccagtcttgatgacggtgcggcccatcacgttgcccacgaaatcaacgcggacgcccttacggaccgacacaccttgtgctaagcagcgagccaagtatggctgcgtcctcgtcatttattaccataggaaagtaatagaatatctgcgcttatttattgcccgcattcggcctcgattgcttgccacagtaaggtagcgagcgtcgtgatgctcgctgcaagaagctcgccatgttgctctgcaactcgaatgggtagaagtttgcgcctaccatatatcatttagtgcaatcatttcatggcatcatcccctaccacaggttcttcttattatcttagctttgtatgctgtccaatcgtcttgcgctttgtatgcctcattcaagcgcgggagcctcttggcgcacaagccgcgttggaggggagagaatgatgctcctgccggtgggtccgcagcgctgcccacgcccgccctccacgctctatacgcagtactaacgactctgcttgtctctctgtgtgtgcaggtgttcgagcgcttcgctgagttcggctggcagccgttcgtggagcccgccgagaccttcgagttcttttccgtgtcgggcgtcttccgccgcgccaatgtggacacgtcgctgcacgcgggtcagcctggcgcgcagcacctcgtgcagcgtagcgcgctgttcgacgtgtgtcttaagagcggcctggcgcacctggtggtggcctacatccgcgccgaggagtcgcagtcgctgcagcccgaaggcgcctttgctggcgtcaaaaactacgtgctgaaggagccgatcgcagtgcagcagtgggcgcgtcgtcgcctggaggccattgagcaggacgtgaacgagatggtgaacgagcagcagtacagcggccgcgagtccccgcgaacggccaaggcggaggctgtggaggaggagctgcggcagctcaacgggctgcgcatgatcctgattgcactgacggagcggttgatagaaggctctcgacaggccgcgtacagctcgaacggcgtggatgccgatggcaacgtgctgaatgagacggagctcatgcgtcttaccactgcaggtatccagaatttgttgcagttgcttgcgcgtactcaaagtgtggcgtgtgcatgcaactgcatgctgtggctccacgagaacgaagtgagtgtcgatggagagatatacaactcgttttacagccaggcgagatcgctccgcgttacgtaccgcgagcagttcgaagagatttacggcaacaagttgtcgtctgtgagtggattgaaggagccgatgcttttgattgaacacgtgatgaagagcgcgagcatttcgttggaggatcttggaggaaactgcccgccgacacaattgggtcaattgctggagcttttgagaacgcctagtattcaggaggacgtcgtccagttttatggcgacgaggtcgatcgtgagcccattgagggatacttccgtgttcaggtggcgctactgctgtatttctgtttggacagggcgtacctgagtgtgtggaaacagcatgcgcagagtggtgcacggattgcgaagaaaatgcgctcgctggcagattcacttgctgcacagctgaacgtccgtgatgatatgaagcttacgttgctggcgctgtggctggtggagaatgctgtggtgatgaagacatcaggtgacgaccaagtagctgcgatttatgaaagcgccatcacgttactgcagcagtcgagcgcgatgcatcttcaccacaagtacgatttggaggctgacttgatcctgcacttgctggagacgctggttcaccgtggtgaaagtctagtggcgtggaaagtgtggaacacgtttggagtggagctcgagcagtcaccacccgcagcgactgaactcgtggtcgttatttcactggagctggacttgtgggagcgcgcgctatctctcatccgcagtcaaaagcgccccgatctgctaggtctcctcttcaactggctgatgaagagtcatcgtctgaaggagctggttcagggcgtgacccttctgcctgcagaggagaaactcttccacacctacatgatggagagtaacgtcattgaggaggaagatgtcttgcgggatgacaacattaagagggtagacttcctcgtgatgtattacattctccgaaacaagtatgagcaggcctgggacgttcaccacgaacacctagcgatgattcgagccatgtcccgtggtgacactgaaatcgcgatggctgcgctgaatcagccaagcctgcgcattcgggcgtctctgctcgcgaacatgtgcgctgagcctcctgcgaagtcgtactcgcacaggagtaggaactcctatattcggatgggagatcgacagcgtcaacagcctcctaagccggcactgctggagaatgaagagatggaagacgtgtctgattccgaacctttggcgccatcaatatccgcaccagcagagccgatgcgatcggatcttgatgtccataccgaggagaaagacgttacctcggtcggaagcgcgtttgtttcggcgcagacggaccacatgacacatttccaggatatggcggaaacaggcgagttcgactactcccccggcattttttcgggacggcagggatccagtgttacgacgcggtcaattgagtcgcctgctccattcgtgacgggccagaagacgccgacgccaacaaaaggaaagggaaaggctagcgctggcgatgtctcgattggttcaatcgactcgagcccagactccgccctccacgctctaactcgaccgaagcccatcgaaacggccccttctagtgtctcgcgaggaatcgcccgccaatccctggactttggctcgtcgccggtaaagccgtccagcgcgccttcaactccgctgcagcctctcgtctccccgtttggcggtaagaaagactaattcactggttcgagttctttttgacaacgctaatacgcgtcattaatactaacggaagcacatcaatccgtatctgtagatcgtcgtccgcttggtacgcccccagttcgctccaagatcaaccctacctttgcttccacatctttggcaccgcccgctccgaaagctgcaggctcaacggatggtgagatgatgaagtcgcccttgaattgcagcaagcatagatgtgttgacactaacgctgtattaccttgacctcatgtatgtagacttctcgctgaagcctcacaacacggatagcatggaggacgagagttccccggtcggatctcgtgaatccgaagcagcagccagcgatgtcccagagaaccgaactgtgcagcaggcaacgacgcctcctcgtgacgccgacatgcctgacgtcttatcgactcccaagcggtatcagtttgtgcgtgagccagcgacagactcgcgtctcgaggtagcagcacactcggactcggatcagcccatgtcgccggcgacagaggagctcgagggcatggagctcgaacgcatcgacgaagagtttagcacgccgctctctcgctcaagggggaggcggaaggagcccgcgagcgcccccgtgcgtcgcaacccgcggcgatctgcccgccacaaatactaaaccgcggtgcgtagagagaataagcaccgcacgaccgccgtgtgtgtagacagaccgcctcgtccggagctggcaacccagtagatatagcgccatttccagccagcaacgtcgccatcaacgtgcttcaagagatctcagcgtcctgtacaaacaacgaccgtccacccacccacacccgcggcctcccgataacaattcactatattctcgctcgtctcgtagccatctctctctccatctcgctctactcgtcgttgcttgggccgatgatgcggccttcagagggcaccagcatcgggacgccctgccagatcgggtactcgacgttgatctcgtcgcacacgaggctgccgcgaccggcgtcgtagcgcagcgggtacttggagatggggcacaccaggtgctccaggacgctctcgtcctcgagtttcgccgtgcggtcgaagcgcgaagtcttcgtgctcatagacctgacgctcagcttggtcgcaggcgcagcggatgtcgcgcgctggagcgcggggcgcagcacactccgcaacgagttcatggtggggtcgacggtgttgatctgtcgcttgtcaaaccgatacaaaactttcatccaatcacagcatagaaaatgtatctcctgtaaaacgagtggctgaaaagggaatattgaagccagcgatcttcatcagttgaggaagaagccaaagccgaccaagacgagagcatgggcaagaagaagtccaagacgacgctccccacggaggacatggaggccagcgcctcggagagtctgctgcctggtaagaatcctctctatctcctctttcaaaccataccttgcacgccgcccccctctgtatcccggtctcctgctgacttgaagttgctgctcatgtgtgtgggtagcctctgacgccgagtaccaccgcctggagcaccatgagaacgccgcgctccgccgccagcgcaccaagtcgcgccgcatctggtgcgccatcatcgctctgaccacgggcatcctgagcttcattgccgtgcttgccatcctgcgcgcagtggaggacgccaaccacctcgcccccaccaagcgcccgatcttcccgacgcagtacgaggccagcgtcaccttcaacatgccgtacatcgacatggtggaacctctgtacgttcacgtggacgaggtcaaaggcctgcagaagctgagctactatggcggcaccgacgtgtacatctacaacaccagtggagccagctaccagatcatcccggtcattcgcgagcgcaagtgcttcaagtctggatcggagcccctgcagcacattttccccaacatgacgctctttgagcctcaacacggcgtgttcctggtggaaggacgtccgtgtttcagctggaagttcgtgaccaagcttcatgagccgacggaggatggattgctgggcgagtacacgctgtacgtggaccagaagacggaacgccccgtgcggttccactacgtgggacgcaatgggatgctcggtggcagccacatcgacgagtacttcctggactacatctacgtgcgcgaaggacccgtagacgagaacgtgttctcgtcgctgccaggttcgatgaactgcaccgagatgcctggggatgatggtggtccgtcacgcaacccgaaggaggacgtaagttttacgcgttgggttgttcgcctcttgcgagttggtgtcgatattgacgagcttttttttctatgatagatccacttgctcatgcccgaaggcaccaccaggaagaaagagattttcgacgacttctcgtcggcacacgtgaaggtttacaatgacgaagctgaagctgttgatcgaatggcgacgttccatcacaaccgccgctttatcaacgcggagaaccgcaagggacactcgtatcacctcgaagtgaaccggttcgccgatcttacgcatgatgagcgtttgaagctacaccgtccgtcgcgagtcaaacgtgctaaggacaacggagctatggcggtacacgaactttcaagtttcgaggacccgggagatatggactggcgcacaaagggagctgtcacccctgtcaaggaccaaggtgcttgtggatcgtgctggacgttcgggtatgatactgttcctggctattcgacactatttgtcctgctaacacttcgttttcctatcgctcagcacgaccggggcgctggagggtgcgttgttcgcgcaacagaagaagctatacaatatgtcccagcagaaccttcttgactgctcgtacgttcccgaattatctgcacggatggcggcgagataagtaactgagaggtgtattttctcgaatgtaggtgggactacggcaacaacgcctgcgatggaggtctggactaccaggcgtacgagtggatcatggccaacggtggactcgagaccaccacgacgtatggggcgtaccgtaacgcccccgactattgtcacttcaacgccaacaacgccatcggacgcatgacgggctttgtgaacgtcacgagcgtggaggctcttaacgacgcgctggccaccatcggcccgctgtccgtgtcgattgatgcgacgctcccgtccttctacttctatggcggtgggtactacgacgacgttgactgcaagagcgacctggacagcctggaccactcggttctagcggtgggtgtgaccacacacaatggacagaagtacacgctggtaagaccgtggttgacaagtggtcgattgatctgccgattgaccttgcttgtttccttccaattgcacatgcaggtcaagaactcgtggagcacgcactggggcgaggacggctacgtgaagatctcgcagaagaacaacctctgcggcgtcgctacggcggcgacctaccctgtccttgccaattgatcctgtcgtctcctcgcatctgagctaaggcaacttgaagttgcctttcacgcgcgctgccaaacgcccgatcccatagcgtgatgtgtattctgtcgggcgcaccgctccattcacaaccgaaaccaatgaaatccagttatcctcgattccaaccttacttgtctacactaacacgaacccaccagttgatagcaaaattacaataccattacgatttaaatcaagtctaggatgcagtagactcatgctggaggtaaataaacgcatgcgacgctgttcagcgcgctgctggtgtcagcgagccgtgccgcgatgtcttggtgcagcttttaggccttggaagccgacagttactgcaggaagttcgccacacttgtcttgcttgggtcgctgctcgccgctcggcggttaccagcacgaggtcgtcacgggcagctggggcacggaggcgcagtacgcgccgctgttctgcttggcgtgcacgcgggcgcgggccttcttggaggtgacgctgaggtccacgggcacgcgcgcgttgcggccgtccacctgcggggcgttcatgaaggccgagataaacgagtcgagcagctgcatggtgcgtctagcttggacggatggcggtggtcttgacgctagtggtgccttgcgcgcttgggagcttttcagagaatgccgccctccatgaccctcaagtccagcgccaactctgccgctgcaggatgattttctctcgcacccggtgcaacgtccgccaggctaatcaaagcgccgaaatgccgtgcgctggacgaatccggtgacgtcgttgctgtgacgctgctcgcggaactggcgtggcccacatagcgtatgtgcgccacatcatgtaccaccgcgacgggtacacctttaagcccgtcttgcgctgccggacacaaatcgaagcctgcctatgtgcttgaccaacacagtagtgacgaccgactgaccgcagttgctgcagtccggacggttgttggagttggcctgtaagcaatgtaattaacattgcatgaaggagcactgagttgcctcaaagactgtatttggggtgagaatgccggagatcagtcgaatgtttgctgcagcttactgggcgcccccgttccgctggcggtatttctcgatcagttttaagtcgtccagcatctcgcgctgtgcttttcgctggcgtttcgacagcttcgccagtttctcgagccgcgctagctcgtcgcgcattgccggctctcgctccctcacgaagagtaggaagtaattaaagtccttctggccctctagtgccgcacatttcagcaccttcatccggttataaccctccgtcatccccaacgccaactttgcgtacgcgtcggatcttccagcctcagccatgatcagcgttcttgccgtcatctccgcgtcggttgcccccctgctgaccatcacgcgtgggggctcatacccagccttcatcgtccgaagcgcgtaggtatcaaagtcgttcacgtatcgcttgtaaagtctaaactcgtcggtcatcttgatcagtggcagctcgtccgccttggtaatctgctgaaatcccagcatttcccaagccatgtacgtggtgacatcgcgagtaagccacttattgagctggtactcttccgacttcttgacgaagtgcgcgtagtagcggtagttcttgtggctcttgagagcgtctcctttcagccccttcagcttcagcgcacctctcacgtagtcatcggacttgccagcctcgagccaccatgtcacttgcgcattttttttcattttgtacagtagcgacgacccaccggttctctgcttcacattgccgtccttgttatgagtcactgggacgtcagtgtcgccccgcagtgatctgcgatgttggtctcccgtgactaccgcgagagcgctaatggtagcgaaagccgcggcagtcaccacaagaagaagacagcgacgcatcagtcagcgttggggaaatctgaacaaacttgttgctggtggtcgagtgcaacgggcaaattgcaaagtgacagcatgtaagatgctgcagcgagtcaatttcgggactgcttccgggagccaccgaggattcgctcgagcacatcgtgggatcttacgccacctccgttgacgtgatgctagcacaaggacgctgaagggcatttgccagttgtggcctagcccacaaccagcgctttgcttcagtccgctcgcaatccgtgttgacaaagagtaaccaactttgacaagtcctgttgacgttgaagtgatttgtacccattccactgggcgggcggtatgtattccgccctggaggttcaatggcgtggcccacacagtgggatcggtggttgaagcaagtgtttaccttcctgcaacctccatggaatctcggcgatcccgctgactagcatgcattcgaagagctacacagcctcggccaagcaagccccgccccgcctcctttgcatccccctcccgactccatggtgtccacgcgcagccgcacgtcttcaggctctccccccgctgctgctgagctgccgcagaagcgcgcggccgccagcgacgcgtccaagcgcccggccaagaaggcctcgacgcccaaggccgccagcgacctggccgtgggcaagagcgtgaccaaggaggtgacgctgcgcaaccaggaggagaaggaggtggccttcctcgacacgttccgcgagcagggcgtggtcttcttcatgtacccgcgcgccaacacgcccggctgcaccaagcaggcctgcggtgcgtcctgtgtttgcgttgtggggaaagatttcggcaggatttgcacttgttaaacccgtaaagctcacgtgacatgggttgccctctttctgcaggcttccgggacaacatccaggccatcaaggacgcgggcttcacggtctacggactgagcggcgactcgcccaaatcgctgagcaactggaaggccaagcagaacctgcccttcgacctgctgagcgaccccgagcaccagctcatctcgtacttcggcagctcgctgcctggcaagaaggtgcagcgctcgcacgtcgtcattctcaagggcggcgtcgtcggggacatccaggccaaggtgtcgcctgctcacagcgtcagccgcgccgtcgccttcgtcaaggagaacagcggcgagcctgccaagagcgacgagcccgccaaggaggaggagcccacggaagcggcgggcaagttcgcggtgggcaacaccgtcacgttcgacgccgagctgcagacggacgcgtcgacgtcggtcaaggtccaggacctgttcaagacgcgcggcgccatcttcttcatgtacccgaaggccgataccccgggctgcaccacgcaggcctgcggctacaacgacaacctggaggcgatcaacgccgccggcttcgacgtgtacggactgggcgcggacacccccgccgagctgctggcgtggaaggagtcgcagaagtacaagtacacgttcctgtcggaccccaagcaccagctcatcggccacttcggcagctccatcaacgatggcacgcgcgtggagcgctcgcacgtgatcgtgctgcccggcggcaaggtgggccagatcgagcacaacatctcgccgcaggacagcgtcagcaagggcctcgagttcgccaagagccacgccgtggacgcggccagcaagctgtaggacaagtcgtagccaacccgtgtacgaaaaactgcagccgccacgacggcgagtctcgccatgttcatttgaaacaaaacactcaacacaataccttttgccatgttatatgccgtgcacacattccatttccttccttgcctgctgtagtgacggaagctccgtcaagcgtatcaaaatgtgtcggggccagatccagcagcatcactgataggacggtcggcgtgattggaagaaggttgaagtgcaccaccgcaacgttcacgcgcatcacgttgaacggacgcgtggagctggtcgggtgtcagttggcaattccccgcaaaagactctctcgatcggtcaagatgctgcgcaagtgctcggcggacgtggtgatcgtcggcgcgggcgtggccggctgctcggcgttctaccacttggcgcggctgaacgcgcgcaacccgagcttcaagccgctgctggttgacgcactgcccccgatgtcgctcaccagcgcgaacggctccttcagctaccgcaactggttcccgagcgaggccgagacgccgatgagagagctcgtggtgcactccatcgacgtgatggacgacatctgcaagcggaccgacaacgcgctgggcctgaaccgcaacggatacctgttcgtgactcgggatgccaacaagatggagcagttcaagcagctggccaagaacctcgagcgtcatgggggcggggagctgcgtgtccacgagcccaaggacaatctcagcggctaccggttcaacacgaaggagatgcagtacgatctggacgggagtgatctgcttgtgggcattgacaacgttgcggccgcattccccaatctcaagcactcggacgctcttggggcgctacatgtgcgtcgctgcgggtcgatggaccacgttaaggtggccacctacgagctcacgaaagccgcagagtactgtccgaaggctgaaattctacagggcaaggtcacagacttctcggctacgggcggcaacgtgagcggcgttaaggtggctatgcatagcggtgagacgctggaggtgtcgacgcccaacgtggtgttcgcgacggggccgctgttcgagagaacgctggatatgctcaagcagaaagacatgtcgagctacgacgtacctattatcaatgagctgcactgccgagctatcgtcgacgatgtcgaccatgtactgccccctacgatgccactgacgtttgattcggaccccatcggcaagctggaggtgcgttcatcgataggcttcacaacacgaagaacgctcctctgacgttgatttatctctgttgctgcagttttcggataaggatcgcaaggagattatggcggatccttcggctgctcgcatgctggaggactacccaggaggagttcatgttcgcccgtacaacggggacaagatgatgtttgtctggacttatgacattgaaccagtgcctccccgctaccctgtcgaggacgtggttgatcggaggtgcgctgcttcttgttactgattgaggatggtgtactgtaacgctaaccaccgtgactgctgtagattccctgaagtatgcgtccgcgggttgacgaagatgttcccgcaggtgaaatcgtatctgtcgcgatctgaagcgcgcgattcattctacgtgagcgggggatactactgcaagactctggacaacatgccgctcattgggccggcaccgagcacgattggtggcatcttcttgcagtccgctatgactggagttgggctcatgtcgagcgccgcgtctggacacctgctggccacgcacgtcatgggcgagacgctggaaggatgcggactcgcgaaccacgtagacgctttcctaccgagtcggttcgaggaccaggcatacgtggacttcctcagcgatggcggcggtgccgcgtgtggacaggtgtaacaagaacaagcaaatcgaagagtagcaagtgaagaagtgagtgaaagacgtaacaagtgacgtcgtgaagtccacgttgcctatctattgctttgtctacgcagggaacgttggcatcaactcctgttgcttcggtggaggagactcctgaaagtattcgtgtgctagcgcatctttcgctgaaatgcgcttgcgcggacttaaagcgagcattcgactgagcagatcgaaccctgccttcgacagcgagcacccgctacctgagaacgtggcagagagtgggaacttatctcgtagtctggaatgcttcggccacttcccacgcacactcacattcgcatccggaacgtcctcatcgacaccaggccaattctcctcgttaggcgctcctagcagcttgaagatctgatctgtctggtccagttctccacgacctgcaaacagcggcttcatcagcagcatctcggcgaaaatgcaccccaccgaccacatatccatcgcggtcgagtactttttcgcaccaagcagcagctcaggcgaacggtaccacagcgtcaccaccagctgcgtgtacgttcttaagggcgagccgtacttccgtgccagtccaaaatcacagaccttgagcaccccacgcgcatcatacagcaagttactggtcttgaggtcgcgatggatataccagcggtcgtgcatataggccaccgcactcagcagcgagtgcaggaggtacttgacttcgctctgcagccacggagccttcatcttgttctgcatgacgtgcttgaggtcgttctccgcgtagtccatgaccatgtagatcttgtcgggcatggagcccaccaccatctcccggacttggacgatgtttgggtggtccagggacagcagcacgttggtctcacgtagagcggtgatggggaagccctcctggctgacgtcggcgctcatcttgacctgtttcaacgccaccacgtcacccgtttccttgtctcgagccttggacacgactccgtacgttccttcgtcgattttgccgatgcgcgcgtagcagtcgacgctgcggcagcctaaaaggtagaaattgtgcctcggcgggtcatccggagctgcgatttcttcggctgtaggccgatttaagaggtcggaagcgttgccatttgaagaggagacgccggaggagttgaggagaggattagtttcgccggaggacttcttcttgcgccgagaggcgcgctcgtcgcccgagtccgagtccgagtcccagcggttcctcttcgccattgtaaattggatttgtgtacgagacacgaattatgggatgttctgtacacgaactttggaatgggtacatccaacttcaacttgcatttttagtttcaacaaaagtgaatgcattatgcaattagcttctacaaccactacaagcctgaacgtgcgcaccaatgcgagctgtctgtttctagtgttgaggtttacttcctcgctctcagaagggacgcagccaacactgcggaggtggcaactgcaactgcgaccacgaggcgtgtccgcgacgtcttgtcggcgttggccataaggcgcgtgtggtagtcgaacgtggcaaacggacacgacgaaggcgggcgatgggtcgagttgtcggcgccaatgtcctgcgtggggccgaagtactcgtagtgcagctgcgcagccggaacggcccactggttacttagcgatttgaacacggccgacatgaagccggcggggccgcagaagtagaactcgcagtccctggacggcaacagcttctcgagctgggtcacgtcgaacttgccgtacaccgtgtgcgccgtgacgaagtcgttcttcttggcgatgctctcgaggtgctctccgaaggcgcggacgctggcgttgcgggcatactgcacgaacaccacgggctgcttcttggcggacgacgccacgaggtgctcgagcatgctcaacagcggggtgaagcccacaccaccgctcaagaacacgatcggcttggtcgacggcttgtccgtctccagatagaagtgtccgcagggcacgcccacatgcaggatgctgccgaccttgacatcgtcatgcaggtgcgaggatacgacgccggccgggacgtcgttggcggcattgccggactccttcttgacggagatgcggtagaagttctggcccggggcggacgacacgctgtagttgcggacaaccaagcgccccttttgcaggttgtcgaacttgagcgagatgaattggccaggctggaaagtcatgagtcccttggacggatcggtgctctcgaggtagaaggaggtgacctcgtcgctctccttgaccttgcgagccacgcgcagctcgcggaatccggcccagccaccaggcatgttctcaaactccgtgcgtaggttgtcctcagcctggataagcagatcggcgaggaaccagtaagcttccttccaggcatcgatgatctcgtccgtggcggcgtctcccaggacgatcttaatagcgcggagcaagcagccaccgacgatggggtagtgctcggcgcggatgttgagactcacgtgcttgtgtaccatgcgcgggacagcgtcgccgaggttgccgagctggtcgcagttggcagcgaagccgatgacagcgttggcgagcgtcgtggcctgacgggacactccagccggcgcaccgcccttggtcgcgccggcaacgcggtggtgcgacatattgaagaggttctggacttcggggaattcggagaacatgatccggtacatgttggaggtgatctcggtgccgtgttccttgacgacgggagccgtggccttgaggatggcgatggtgttcgcagacatgggcttggggccggtgctgggcttttcagcagtcgtggcggcgggttgttggttgggagccattgctactgctgcagacgtttgctcggtgctgctggggcgcttgggttgtgctcgaagaggccaattgagaagtgagctccagcggcatccgggcagcgcctagcaacggaactcctgacggtgggccgggggttatcgcacttgtgttgtaggtgggggccatagccacgcacgcgttctgttccgatgggcaggccctcgttgccgttgtctgcgctcgggaaaccgctggaacggcctggctgagctctttgggtcactcatcccccctgcttcagctttttcagtattcagctttttcagtattcagcgcagcttcaagtcacttatacggtcgcaaaggcacggtggtagggtcgctgagtcatcggaaaataccgcggaggttggactctcgatacggagccaaggacttgctgctgcgataatcgagccgagctacagtactagatggattggatggagattttgcaccaagtattgtagtgaatggacgtcgataaaaacttaagacgcgccgtttgtgtttctgcctgctacggattctggtggttctcctgcaatcggctcctgcaatcggctctcctatttttacgtagcatgcgggcgagtattggagcccctcccacatagcgcatgagcctggaaacgcgccacccccgtagtacgggccgtacatcaccggatgtcctcgatccaccagtggtggaccaccacgaaccgcaaggttgtagttgtcggtgcggctggtatttgcctgcagcgtgccctctggcgccgacgaccaatgcggggcggcgcaggtcactcatcttcgaccccaaggaccccccgtggcaaggagtccttgccaaggacacgcagcaacagtactcgagtggtacagtgtaccaagggtacgtgttgcctgctttcttgctggccaaagctgctcttaaaagggctaaagggggttggcacgacatactgagccgcttcagcgactggcaacgttgctatgcaccgaaggtgataggcagtgagcgcaattgttgttggtatggagccaccagggctttaaaaagccctggtggctggtgggtggtagtccggtggcagtgctttggattctatggacggctacataacgacttctaagtttctccttgaaatcatctacagtacctgtattgacgggtttccgtgtttgtagagcagaacactgcacacgtaaactcagcttgaacgcgattcgcaattgaacccgtagccgtaaaaataagcaaaaaaggatcatcgaattctgggggtgtcaatatataccattagcctttagcgtcagtaattcgatcactgcaccgccacttcaagcactgcttctcagaccttcgacccgaggcttgccgagcgggtagttgctgatgactcactcacttaaaacaaaaattctgcccgatctttgcaagcgtatgagtgactacgtacgtcggcaaattgattcgcaacgacgaaggcgtcggtgagtgaccgacccccactcttggcacgcgcttgccgggaatacccgtttgtacatcgcaattccagcggttctcaagcaagagttcgttgcgatcgctgagatcatcgctctagcagagcccactttcgaatttacatcctcgtgaacaacaaacaaggcacccgaaaaaataatactcataaaaatacattcgaatactttaattcaatgattaattttagaccctcaatttatttttgaattgcacacaattcgtatttgaattgctcagatggagttcgttgcagccaccagtgtctgccgaagagtccaccaccaaccactcgccgatctggcaccacttcaccgcaccactcgcggcggaggctccttcagaatcaaatttgctttcttcacccctcaccgcccaagcccctcaccccacgtgtctaccatggtcctcacgagcagccaaatctgctccatgcttttcactgatgtcggcaacggcttctacaagtgtacatcctgcgacaagcagtacaagaagggcaatggctacacgaacctgctgagccacctgcggcgcaaccacgacaactacgagcaagaggcccaggaggcgtcacgccaccagaacccgctgcgcctacacctcgtcagcacacggaccagggacctataccgctggctcgagtgggtcgtctgcgaccgcctcccgtttgcgttcgtagagcggcggctcacgcacctcaacgcctccctctctctcgtgtcggaggacaccctctccaagtacatcgtgctgattttcgagctgctagagctgcgcatcactcgcgagctccctgcatcgttcggcctcgttctagacgggtggaccagtggtggtcgtcactacatcgcgatattcgcggtattcggcagcgacagtaccggtattaccggtggcggcgctgacaacgagtactatgacgatctcgagtgctcatcgcgccgcttcctgctgttaacattcgctccagtagaggtcgaggaagacatgggtgcgcagagtcagtacgacctgatcgctgacacgctgtctcgctataacaagccctggagcgcggtgaagttcatggtgggagacaactgctctgtgaaccaatgcatcggccggaaggaaggggctatccccttcattggatgtgctagccacagattcaatttggcggtgaaggacttcctcaagaccgaggacgagctcattgcgaaggtgcacgcgctgatgaccaagctccggacgatcaagggccgcgctctgcttcgccgcgtctcccatctgtcgcctctgttgaggaacgacaccaggtggtcgagcacgtacgagatggtggcgcgctatgtgaagctccagcccgccataatcaagctggtccatgaccttctggtccagtacgaagtacagccacttttgctgcggcgcgccgagcacgagcgagccaaggcgttggagaaggacctggagaagttcgagggagtcacgaaagagctacagaggtctacgctaactttgtctgctgtgcgccgtctttttgaccagggggtgaaggagtaccctgcactcaagtcacgactggccgcaacggctccgatcgtcaacaacccgcatttagaactgggcctcgtcaagcctcagcgcgaagaggcgttgacggccgcggaacggtcggcgtgtgccgagattagatcgacgacccttgaaagggcaccagcgcgggaggacggcaacagctctatcgtcaaggcggcgttcaagaagaggaaggcaccgaggcgctcgcaatacgtggacgtcgcctacgtgccgccgatgtccaacgaatgcgagcgctttttttcgacggcgaagctggtgctcacagacgtgcggaagagtctctcccccaccatgctcgagatgctgatgtgtctgcagtacaaccgcgacttgtgggacgtcaacacggtggagcaggtccgtgcacgaattggcagcaattaatggcaataatgcaatgattaatttttgctcgcagtttagaagtattaatttaagtattgcattctcgggtgccctgacaacaaacttccaccgacaagagatggcgcctactcctgataacaccgcggtagcaccgatcaccgacaagcctattgctgctggacctaagcccatgtccgactctaccatcgccatcctcaaggccacggctcctgtcgtcaaggaacacggcaccgagatcacctccaacatgtaccggatcatgttctccgaattccccgaagtccagaacctcttcaatatgtcgcaccaccgcgttgccggcgcgaccaagggcggtgcgccggctggagtgtcccgtcaggccagtgcctgcattggccaacacggtcatcgattttgctgccaactgcgatcgcttgggaaatctcggcgacgctgtcccgcgaatggtgcacaaacacgtgagtctcaacatccgagccaagcactacccgatcattggagggtgtctgttgcgagccattaaacttgtgctcgaggacgcagccacggacgagattatggacgcgtggaagcaaggcaattggttcttggccgacctcatcattcaagcggaagacaagactcgtcatgaattcgaaaccataccaggtggatgggccggattccgcgagctgcgcgtggctcgcaaggtcaaggagagcgacgaggtcacctccttctacctcgagagcaccgatccgtccaagggactcatgactttccagcctggccaattcatctcgctcaagttcgacaacctgcaaaaggggcgctcggttgtccgcaactacagcgtgtcgtccgccccgggccagaacttctaccgcatctccgtcaagaaggagtccggcaatgccgccaacgacgtcccggccggcgtcgtatcctcgcacctgcatgacgatgtcaaggtcggcagcatcctgcatgtgggcgtgccctgcggacacttctatctggagacggacaagccgtcgaccaagccgatcgtgttcttgagcggtggtgtgggcttcaccccgctgttgagcatgctcgagcacctcgtggcgccgtccgccaagaagcagcccgtggtgttcgtgcagtatgcccgcaacgccagcgtccgcgccttcggagagcacctcgagagcatcgccaagaagaacgacttcgtcacggcgcacacggtgtacggcaagttcgacgtgacccagctcgagaagctgttgccgtccagggactgcgagttctacttctgcggccccgccggcttcatgtcggccgtgtccaaatcgctaagtaaccagtgggccgttccggctgcgcagctgcactacgagtacttcagccccacgcaggacattggcgcgtaaatgctggtgacaaaagagttgattgggcgcctaccgcgggctcgtatcctagagatctagcgatagtaccaccgtaggcggagatgctgtgcgtctccgggagtaggcagccgactaaaccgcaacaaattcaaattgaaaagagttgacggtcaagactaccacacttgcaatgtagcttcaggaattcctgacctagtaacgtggtttcaatggaacaggcttcggaccaaagcctttggtacaactcagtgtattgactacaaagtgctgtttgcaaacgtgtttgcacgtctgctgctacagtatatcgctagcgttcaaaatcaccgttcctccagcgaattgctaccggttgtcgactcaatatcccgcatatgcaccacggcgtagccagagtaatctaatgtaaggggatcattgaaaaggacttttcgtatgggattcccagtcagctttcgacaactgaaaagagccgaaaagagctttgagatggatatccggataattcaataccatctaaccccacaaatatattagcccagctttactacacactaacaaacagtttgcaaacgtaagtgtcagctacgcagttaacgtgtgagcgaaggaagatttttaaacaggtcttatgcaggtctggtcttttttggtccgtaggaccaaaacaagaccgaaataaaattagccaaaagaacctacatactatacatacatatatgtatacccgggttttagaaaaacgctataatcaaatatgcaaaacggaaaatagatgtattatgtattaagggagatattgcatgaaaagccgtactggacaaacctgctgtcaacggttaactgtcagtcatgctaatccggcttgtactctagctgcgggtcgtccgacttgatgaacacccctgcacccgcgtgttaatgattcagccaaacgatagagtacacactcggcggattcgtcagcaccaacagtctctccacggtaccaacaccgtcttacaggcgactcacatgagaccgcaacgcagtcgccatgggcccaaccagcgcaccccaacgcaagcgaagcgtccaaatggtgccaactcttggccagcaagcttcacaggataccatccactctcaccaggccgaacgtcagccaacagcagccaaagcatacgagaagaagtcgacgtcgatcttcgactatatgcacttaggccagaccaattgtggttttccttcatttgtggcatcaaagggggcagtcgagaagttaattttgagtaggggcagaggcttgaagtgctctgcgaagcagggctgtgagagactggccccatggaatgtggtggacgagttgcgagctagcgccctgctgtatgtcgatcgctcgatcactagcgctggtcgctgtgtctgtgtgctaccgctactcttcctaaaacgaactctcgctactgctgtctgctgttgtactctgcctctacaggaaaccccagtagtcttccacctatgcttctcttcactgcactttgttgtgttccgctttcttcgtccgaatactcgccacaccagcatgaagtcagacccagctctaacagcgccttcaaacagcacatcagcatcttatcaatagcacgctcaccaaaagctaggtggaagtgcgccttcacacgattcgcgtcagtgtcgagactgtcttttatttggggactgtaccacggatatcaacggccaacttgaccatacaacagtcgacatattgcagctaaacaatccactactcagaccggtccgtttgcagccatcagcctcgcagtgaacagcaccaaacaagcagtcaagcaaactcgaatttaagtgccaacacggaaaagcaaccacgacaaagcaaggggattatcgaacattaccttagcatgagccgtctatcaaggggattaaggatactctaatttcctgcagaggcagaatacaatcaagtacttcaagtaccaagtaccaaggatcagtggcatgcagataagaatacatgcacgaagatagcagtagattcaggcacgagaacgcctgagttcgtggaagctcttttaggaaggctagcaacaccgcacagtccgagcagcgtcgacgatccagcgatcgacatccagcaagacgctcgctcgcacatttcagacatttgtgttgtaatctccagcattacttcaataggaactgccctctatcatctatcacgatattttgtatcagagtgaagggggtctaaaaatggcttgtttcgtagtgatatcatttgggtctcgccatccaaacgggaccgctagcgacgattttctgttcggtctcgtttagatgtcgtaggaccaaaacaggaccagacctgcataagacctgtttaaaaccttacctgagcgaacattagactagaaccagtgctataggtgtagtttctccatggcaggctgcgtttctgactacgctagccagggatgggtgggcccataaccaaaacgggggggggggggggcagtttgcagtttgtacagttccattcgtcagtcaaacacaaccaattttcaactcaaaaagacgcaaagctcgcatcagtagcagacgtgtcgtgggaggggcacattcatgatcatgaataactgcacccacagtttccatgcaatgcagtgcaattatttacgtgttcgtgtagccaaattacacctgcactagtctcggtcttgctagtcggcggcatagtctggtgcccgcatacgtcgagtctcctttggcaggagactggcggcgcgtcagcaatagtcgtcatgggggcctcccatattcgtcggtcttgtgctagcggtaaccacatccactgaaagccaggctatgatcgagaccaattagcacggttgtttgggctgttcctctccacttgacacgcagtgctagccccacaaaacaccaacttgtaataaatcatcaaataaatggcaagtctcaatatcgactttggatgcatgccatgtcgtcgccgggtttttgaggaagaaatacaggatgtacaatggcacagcatacattgttggtttttcgcgaaccacctgcggaaggtggcttgccaaactctggtagcttcggaaaataccacggagcatcgcagggagagaaaatctgaggcagcgtaggacatggctggctggctgcatattagcatgactgagtgtggaccctggcactaagtcatttacagaggtgtgaagggcttcccttcacacctgtgtaaatgactttttaagatcggaatcagatcttggattcagatccgcatgtttggtgtggagcacaaaggtagtcgaggtcctttcgagacgcctcgtggctgcgtgtctttgtggttgtgaagtgaatcttgcaaggcgatcgcacctacggtggtgatcgctgtgtaattacgctggtttgcagcggcaagcagtcaagacgctggcagcggcaaaccagcgaggatcgcacttgcactttgcaggaaaccatgttccatctcgatgtttttttactgtttcagtatgtttcacaacatttagcacatagacgctgcaacaaattggcatcaaccttttgcttgctcgaaattttaacccgcttttcgacatgaactggggcttttgagttttgacttgagcgccgtgagcattcatgagcattagcgccgcatggccccagtggctgttagtgctggccgtctggccgggcaggctgttgtgtatgatacgctgtatctactgaagctcccagtcatcaccagaaacctcgtatctgcacggctcgcgatagagacgccaactacatgtacagtattcctagctctcggcgatgcagcttgtaccggcgggcgcgctgtcaacagagaagcctcgcggcagcatcgccggctttaatcgcttgcttttcattgcgacggcctgcaccgcctgccgccccgcagcgcggcgacggcagcagtgtcggggttgccgtcgcccccagccgcttttgcaatcctggtctctgatcctgtcacattcgtctgcagcacgcggtgaaacaagacagatgacgaccccaatggcggggcctgcacgttcgagccttgcgcttgcgcttccgcgacgaccgccgcccatgtggtcggcgaagctgcttggacggcagcgcattagcgttagctaccgtcgctgtcggagctttcagtgaaacggccgtgctttagaccaacgcgcgccagcagcgccttgaagcatgggtgcaacggcaattcagcagcgaatatatatacccagcagaccacatcccagcaggaccgtaacgccctgcagcgttcacgcctctcctggccgcggccaaggatgcgtataatcgtcgagttggggtgaacgagttgaagggcccacacaaaaagagttgcgtcttgcgagcgcaggattggaatcctgcggccagctgccgcccgggacgattagcgtggcgcggtgtctttgtgtccgaggtctgtctcccggcatagtgaagccaagtccggcgcgggcgctgactctctcaacacggcgcggcgattggccgaaactctttttgcaccaatcgtgggtcggcacgaccgtcggcataccctagcccgttttacccgccgttgcttgctaccgtggaagaaaaaccggggcagccaccggccccctagaacgcaacgagctcgaaaagagagaggtgcgaagagagacgagagagagcggaacagacaacccacaggaacaccaccattgacccccaagcatcccgagaatgtgccggccgatagagtcacgcgattcgctgggcgccatgggcccggccgccgtcgcgctgttcgctggctaccagcccgcggccgcgagcacggccaacagcatggccatgatgagccagaatgccaaggcgggcgccgcgcccgcctggtccaccaccggcgacctcggcttcggcgcggacgcgatgaacatgctgagcatggcggcgccgcccccggcgctgccgttcgtgtccttcccgaagaccaacaacctgccggccatgccctggggcaacgccgcccccacggccgacctgatgagcctgggcatgcccagcgaccagttcgtggccgccccggcccccgccgccgaggtcaagcctgaggcggccgctgctgccgcagtgcagcccaactttgaggcccaggagctggaggagctactggacttctcgatgcccggcgacctggagagcgtcggcaaggacaagcccgacctcgtgaacctggacgacggcttcgacggcacggagatgtcgatcctgtacagcttcctggtggacgcgcccgaggacaagaagcaggcggccgaggtggacgacggcatcctgaacctgaacatgctggcgggctccccgatcgagggcctcatggagtcgctcgaggccgacttcacggacacggagctcatgctgaccccgcgtcgcccggagccgcacatggcggcccccaagacggtcatgcccggcgaggtcaagagccgtcgcctctgcaagagcgagggctgctacaagcgctcgcgctcgaacggcctgtgcatctcgcacggcggcggtcgccgctgcgccgtggagggctgcgacaagagctcgcagggcggcaacctgtgcatccgccacggtggcggcaagcgctgcagccacgagggctgcgacaaggctgcgcagtcgaacttcctgtgcaaggcccacggcggtggcccgcgctgccagttcgctgactgcacgcgcagctcgcagggcggtggcttctgccgctcccacggtggcggcaagcgctgcatgttcgacggctgcgacaagggcacgcagcgcggcgactactgcgcgctccacggcggctcgcgtctgtgcgaggtgccaggctgcatgcgcaacgaccgcggcggaggcctgtgcgccacccacggcggcggcaagcgctgcaccatggagggctgcaacaagccgtgccgtcgcaaaggcctgtgctcggcgcacctgcgccagtcggaggctgcgaagtaaaggtgggtcgatcaagaggaagtcgggctactgtagccaaagaagtgaggacgagcaggtgacggctgtgatggttggacgacgactcgatgggccgacaatggaggagacaacgaagttgggaggagggggggggaggggcggagttggaagatggtgcagctgacggttctggtggctttcccctcgagaatgaattcgacgcgcgcgcctccttcgctgtggaacacattagcggtgttgtgcatgtggttatatttgtgccgagtagggtcagccaaacactagtgtgctacagcctcggcgctgccgtaggctaccacagggttggaactcacgacgtcgccgaaggcactaagtaaccttctggcaagatcagatactgcttagcaatacatatcttcaaaatatttttttaaccccgcagcaatctggctcattgcgccgagtttcccaacaggatggtgctggctggatgtaagataaagcaagcggccttatcctagagggttgttcgtttagatccatctctctgaagttgcgcaaagttgtccaaagtcgctgaagcactgacatttccggtatgacgacataggcactgttagaaaagtacatgtagcggccgcgagcaccacagctgctgtacgacgatgccgatcaagacacggcaggagcagtacgaaggtaagtatgggaaaaggagaaaaaggtgacgatgacgacgatgctgatgaagatggaaagctgcttgaacgctggacccagaggtcgggagctgcgcaatacggtaatcgcccacgagcgtcacgaggtcttcgtagaggtccaaggtgccattactaatggcaccaatggcccattagagcactcggacggctccgtctgctccaactgcgtcagcatcgcttgataagcactgttggactctgtgggtaatagcccgaatcggacgagtacgtggaagcattcgacgttgtgcagtggcaagtcgtggcgtctgcaacaaatgtgagcgtattggaggccgctgccgctagcgcgaccagcaaagcgagggcgataaggaagattcggaagtggagtggcgccaaagacacccatttcattcagctcggttctactagtactaaggaaacaacttcaactaaaactgggtatcctgttcgaatgtgtttgatcagctatgaacccttcttaggttagccgcgagcactggaatggtctgatgaagtatgctagcccattgatgagcagctaccggtgccgcggtattgaggagctcagcgcttcgtcttctccccgtaagcgagcttcatttcgaaggcggggaagttgtatccacttcactcggtaggtttatgaggcagagcacaaagttctttaacaactccaaaaacaataacttaagccaactccagctttgtctgcgattgccgatgtgtgccgtgtcgtcactttcaacggcgtcgtgggggacatccagaccaaggtgtctcctgctgacagcgtcaagcgtgccgccgcgtttgggtaggagaacagcggcgagcccgccaagtaagaccacagctcgcggaatatggcggagattccgcggtcgcacaacttgaatgaaacttttggacacgattgatgttgttcctcctaaacggacagaaacaaatcgattgtagacacctagtgactgatgtcaggtcgaaacagttgttcacttttcattttgctgtcttccagcctacgatgctgaaggtccgcgttgctgtcataggagtccagtacgttgacgaaagcggtggatggttcaatgtgctgatttcaccgcacgaagacattgtaacgcgttccgcttaagaaaataacttgaacactgtggtacacttcctaaagtgttgatcgccgagtagattcaaaagtggggaagcatagcatgcttgccccagcgctcatgcctgtcagtttctacttctagatttctgctcttctacggattgttctcttctacagatagttctccccaactcctagttgactcttcacgcagtccatgccagctggggtaatgcactgcaagacctgagcatggcttgaataaccacctcacactacaattccctcccaagccatgttcactcaaaagctctctgggaagtctcttaggttgcactgccaccatagtgctaccggggggggggggggttgccagatgatggcactatttgataagtctagacaaatgatgttggcatttgccaaatgatggcactatctaataattgatggcacttgatggcactctatctaattgagaggtcgacggtgttcattagcttcacaccggggtgctcattaagagttctgtgctgtggcaagcacggcgtatcaagcacgctatccacatggccgaaaacaccctgaccagtaccgatgggcaaacgatccgactttcgatgaaactcgagtctcgacaagcaacaaatgagcacatcaagaatttggctgaagaccaacagtggccaaggttcggcatcaaaagaagtggttgccaatagtgatgaaacaccaagtcatatgacagcaacgcagcgatgtatgggggctgcggtcggctcgatcataatgcgcaggcatgctcggttgaagtgccattgaagagtgattggagggcaaaattaagagcgccatcaattattagatagtgacatcatttggcaaatgccaacatcatttgtctagacttatcaaatagtgccatcatctggcaaaaccccgtgctaccggccacgaccagcccaatctcgagggccagtggtggccctacccgcgggatcaggatatcagtaggcggcaacagtgcttggggaatcctcttcgtctggggcgtaggccatcacgaacaagcgcacaaaattctcgtattcccgtactactgcgagggcgcacgccgacagcttcagacaccacgtcatatctctgcgcagcatgacgtgagatcagtgcaacgggcgcctagacgacacatatcgcgcacactttcctaccgttcgtctgccgacgtggataatttgcaagtgctccaaactcgagaacagtgtagatcatgttgggacctgtgcgtgcgacaaactctcgccgatttctattctccacgtcatgttgaagttagctcatccttgcaaagctgccagtcgccactgcgggtatgaatccttgttttgatccgtttgctcggccgtagtcgaaagcgtatctgttgacggcggcattttcatgtcggcaacgcatttttcgaacctggcaaatagagtctgtagagcctgcgcttgctgtacgtggccaaagaagaccagcatttccagtaacgcaccaatctctttcgccaatgccgagttgggtcgtagttccgaaagctgttgtacgacgtaagcttcttcttcggcgctgccctccttcattctcttgcgcctttctcgacgagaggggattcctccgtgctttgccttggccttgggcttcttgccagcatctcccaacgcttgggtagcgtaaaagtggctagccgtcgccatcgacagtgattgcatggagaagttgccaatacttgcagcgctgttgtggctgccgactgagctgatggacgcgttcgaaagagcgctatctgcggcactcgaagccccagaccgaacgctacccgcatctgtatcgccatcacctccagcgccttggtcccaccgactgccgtcgattccgtgcaacttgaaaagccgtttctgctctcgaattgtggtcaagcgcttccagtgcttggtgtactgcttctccttgcgttccagctcctcctggacgtcgtcactacactgaagcactcccgtttcgatgtcactctccaccaggtcgtcacgcctgtaaaggtaagcaacacgcaagccctctgcccactgttgatgtgtaaccagcagcgccactgcttcgtcgacgtcgttgcagtactcgacgtaaatccttgccaccgctaggatatcgtcaactgatccgacttgctgttgttgttgcctgtttagcaactcttgagcaatagaatacgcctcgctgcggagattttcaggggtctgttgatcgcgagcactcaaagccaaagccatctgccacttattggcagcgatgaatgcgcgccgcgccttgtccttgtctgaagctgacagatagacgtaagccgccgcctcgtacttcttctccgcctcaaggaaatcacccttccgtctcaaaatctgctggcggaatgcacgatcactccgcgacgtcgaacgctttgcaggtgcatgagggaagagttgaagggcttggtcatacagttctcctcgctcaatcagttccagcgccatgctctgcagcttggtcttctcttcgtcattgtcaccaccgagttcgttgatcagtgcagcgaggtgagtcagtgcacgcgcgtgtcgctccatatgcacatcgatcgtgtacttccgccagttctcgttgtcaagctgcgccacacggtcgaggaacggcacgtactctttcggatcccgctgcgaatgagtagcgacggtccgaacgaggtcgaggtcatagagccctagtgcctcggagtacaaactgtccacgtctgtcagcatgatcagatgctttatagcacgcgttgctgctgcacgattcctcgtaccatcattgtctccactactaagctcgtttcggtgaagcaagccccgaatcttaccgagagcagcatcaaaacgtggaggcgactgctttacagcactcgtaacaaacggtagtaacagagcagcctcggtctcctctccgttgctttcgagctcttgaatcgcgtccataaatgcctgacacacaacgttgaccttctcttcaggtccgtaggcagctgtgctgtcttcttgaacgccacttccacccgtggtagcagtgaatggctcaagcagtggtccatacttcgtcatccacacgtcgacggggtgaagattggtgatgaatagacaaagtctatcactggttactgccgctggcctagtcgatagaaaactttgtatgaggaatcgtgggaagtttttgatgaaggcttgagggttgaagtccacaagaacgttcaggtcgaggcgatgacggcggcagacttccaatgccgcagcgtactcgagcttttgaatttgctgcacagccagagccagcaccagtagccgtggagacatgcactcgaggtttccgcgcggcatctgcgcaatcacgctggcacgctgacccaccgtggcgacaagaagagctccacgctctatcgagcgcgattcacattggacaccgtcgctgcctgccgccgaaggcgtgcgatcgttcgagtgcttttgaaggccattcaacggtgcgatacgcagttgcgactcacgcccttgagtcgtgaatagcagcactgaagccaacgcactatagcggaaggatgaacaagcggaagccaacagctcgccattcacgtacagccttgcactagagctttcgagtccaatcaccaaaaggtcatcagcggttggttcactttcctccttgctaacttgacagtcgagcaccgtaaagtgtgagaacgccgggaatttgccagatactcgagtcggaaccaaactcgccgcgtcagacatagcgtccagagtgtacacagcaccattgtgagtctgtacggcgagggtaacagagcttgaatccgacaccgatagactgtcaccagcaatcacctgctgagcctcgcacgctcttcggacgttgaagaggtcagttcgatgaacggtggctgacgcttcgttgagactgtcaaccgagcatacgacaagctgatcttggcgtccagtctttccggcaaaaacgagtcgtcgagactcagcgatgaaacggacccagaaaatgcttgcaagtgtgaatgtctcgttgtccgctgcttgttgaggcagcattacggttgtcattgacataggctcacctgtggagaccttttgagttgcagcgcttggtggagggggtaaacctgcagctgaagctcgcgtatctgctggagtgaggtagttcttcactaacatcaccgtgccgtttgcgagcagcgccagcaaaacctcgctttgggaatcgaacgcaactgaggtgatcgcggcgtcgaatgaagcttggagtagtgcgaacggaggtggcaccatggcacggtgcaacggcgtgagtagcagctttgatccatcgataactcccgtcacagcgatactctggcgttgtgattccttaacacgagatgactgggtcagctgttgctgcatccactccgcttccacactgcagatgtcccaagcaaactcgtgctcatagaaagtaagctcttgtgtgagtgacgaccacgtaagaagattcagtcggcctgcagcttcttcatcccacgcaaaatcgacaagctggtcgtcctcacgaagctgcatatcctgcttcaggtaccagtggtagttgttcctcgaccaaagctgcaccaccgttcgctgattgcccccctcactattaccaataccatccgtcggatgcaagctcactgccagtgtgtctgaagtcgcattccaacgcacattcccaacacgaaacgccggtgcacggtacgtcgcagggatcacaaactcaccatggcgcagtccattccgctcgaagaacaccacaaccagccgccccttcctcatctcactgctcgcgatcaacgctagactttgactccaatccaacgccgagcccagtccggggatcgcccgtccatcttccagtcgtccaagtgcatggaactcgagctgctcggtgaacaccagcactttgttctccaccttctcgctctgcttcaccttggtcacaatgttcagcgcaacgagcttggagtcctcgcgccaacgcagttgagagcaccagtgctccgagtcttggtcacaattcagcagctgcagttcggagggcagcgtgtcttggacctgcgtctcgtgcagcacctcccagtcgttgctcatcaccagcaacgaccccgcacccgtgaccagcgccagcatctcctgattgttactccaggtcacggctcgcagtccgctggccacgctgccgacttcttcgccgtccatggcatcaacgtcaaccgagacgatggatccgctggtggaggcgcacaccagcgtccccagctctgccacgtaactcatccacctccaggaccctgcagacagctcggcgtcgtccacgaactcgcgtacgtccacgaacaattccaggtctttggacgtcgattccgcatcttcttcctcgagctgcagcgactcgatgcggccgctagcgcgcaagaaaaacacctgcgagtcgcctgggatcgaggcaaacgcgacgcattggtcggtgggcgcagatgacgcctccagcgcccacacgcgccgctgcagcgacaccaagttgcgcatgctttttgaccaccaaaacgatccgactgccggactctgcgaatagccaaagcaaactttaaattggtttgagtaagttcactgaaatcaaatgaaaatccggttcgcgcgtggaacatgatacttcgggagaaagggcaacttatcgaagtacaaaggtccttgaagcagcaacttacccaagtacacaggtccttaaagagggaccttttccctagaatatccgacttcaggaaaatcacggtacttgatcggcaatcctctgctattttctcgaaaatagtctttaggtacttgttttgtacgtaccggtaagtacaatgaataaaagtattgtggaaaccgattagattcatgctctttcgtaagacgatacttagccccagaatgcctatcataagacagcgtcttacgttttccgatcaacgcgttttgactacgtcttggtttgtgtataccagtggctacattgcatattgtctgtcaaaacataagacagtttgtcggacactagtttgcgccgtacaattggccaaaagtgttcaggtctgctcgccacgacagcggcatcgttgccgcggacgcggtggcaacgttgagcgccgaaacgatgcagttgcatggtgtggtagggtaagtagcctcttgttcacacatttatgcttgagcgtacatcatagtagttgtgaaggcgtggcagccagggaacggtgttgccagtgggcttcccgagatcctccaacccctcttacctaatcattacagtccagcaacaaaatgcaaacacgtactctgcaacggcgataatacctagatcttatacctacgagtctacgctgtagcatcgacaaaaagcatggctgcaggcagtggcttagttgcaggagataccgagtaactcgccgatgccgaaggtcgagcccagcagcgatatggcgcgtgccgagcgcccgcgcagcagtgtggagctcctccgcacctcagcgtggtttgcgtttgcgcgctctatccgaatctccatcttctatgtagtgttagtactttattatagaaaggagagttggcgtggtggggtgaacgacaacagtcgttcaccccagtaaagcgaagaaacattgctccactacgggaacaaacggtcgcatgataactgtgctatgatgtccttacattccattcctggcaagtatatttaaatcttctagcagaaggttagtgcatagcgtcaggatcaaaggcccggacatttcaagtgcgctgcctctagtaaagggggcaaaatgcgcacacggatgaatcagtccaatttacgagccgagatgcagcaacactcgagactacataatacaatattaaccaatgaaattactacatttgatttgtcgtcaaactgtcttacgaatgctcgacacaagtgattgcccgagcggattagctgataaagcagcgttcatgagagatttgactggtactaaatcggggatccttatgatttcatatggcattggtaagggtataaatcggtgtaaggttaataaaatgggggttgcctcattacccgccagaaatacgacgagcgaccacttaccgccacgagctgagtgattcgcgtacctactaacgagaaatagcatcacgtgcattaaatacgcttcttgagtttcgatgtgtactgctatctatttatcaagttctgaagtcatgtatttgcgctgtcgtttctcgtcagcattagcgtttgtcggttttacgttgaatcggccaccgaatgccgtgtgggtgtcggacattcgggctgattagcatgcaaatcagccgtcccgggctttgtaaaccgtggagcagccaaatcagcttgccacatggcgttgtaggcacaactgaccgctctgtcaaatcagagtacaaatcttagtctgtcgatctaattaggaggttggatttagcaaatcagacccgattaagattaatcatctgcttaatcaaccgatttatatcccaattagacaatctaatcggtttccacaatacatgtattttacaaaacaagtattgtgcttttcattagaggtggggtactaattgtaccccacctctaatttttgattactttgggtgggggcttacaagagtagcccaacctctaatagtaacccactctccactaaaacaattaaccccccattcaatagaatacaaagctattggcagccgtgaaggttcttgttgctggtctaagccgtatagatgggtgctgtatgtgttgggatcttaccacatttttctatctttatcgttactgctttcgttcaactacagagaaccggagtgcatgcaactttaatttaattaagcgatttgcatgcaatacatgtagcgagcctgatcccgagcaatagtgactgctgtcgtcacagcctatggcttgcgcaatgtacaatgtctcctgtttgctgactcggatcgtgatcaaatggcatagctcgtcgtgatgtgtattgttgggaacatggctcagacaaaataattattttattttattgagggggtcaactcgagtcaataaattattgggcaataaactattgatcataaagtaaaccactaatcagctacctccgctcgttatgcgaccactacacgttgtctcttgttagacttaagtgcgtcagctacaagctcatcatcccaaaggtttcagcatcaccagcgtctcgagagtcgtagatgcatgctttgccggtggtcagtcaggagtcagtttcagtttgtatttgaggattgtataagcaacgtctacctgctaaagtaacgagctagataccaccgtcgcttctgagcctacacatctcatcagcccgctgcatggttgaaacggcccaggcaacttctgtctaatttccccgtggacagcgtcacggtccctgtgcccccgaacggcatcgctttccctccgagaaccgaagccctctccactgcacttgtccaagcagatctgcgttccttgctgccgtatatgttgcaggccatcttgaagcgctccagcagcactgttgttcccccaaggcgctccgtatagctgcctctcccctgcgtttactccgccccgccgcgccatgaactttaccgatattcccatccacgtcgcaggcctgctacgtgtggcgcaggccacattgacactcagccgaatcccgctcgtcactacggtgctgaggatgggctgcgcgaagcacacccaacgacctggtgacctgccagagtcgcacgcatgccatgaaggcaccgacgtccagttgggactacggcgtcacccgtggactggtttctaatgggaaacggcgcggtggacatgcagtccaccgtggaccccccacagaccccgccttccggctgacggtaatgaaccgccgcaatacgtcgccgcgtgcggcaactcagacatccagcttggtccgcggtgtcacccacgagctgcccggccaaacatgcacgcacgtcggccaggtgcacgccgtccatcggagctcaggccaccaggaacgagaggctccaaagggaggaaacgtcgtccaatcgtggccaatcagagcgctctcggtgctcaccgtcgctctctgattggccagaccgctgggtcagctggctctatcgccgcgctgcccgctgattggtccccctggtgtcttgagctccacggcgcagattgacgagtggtcaggagtcctgactcaggactaatcccaacctcaagaattaacgttcaacgtcgttcgagtcggtggaattcagcgaaagtcgatgagctttgacagcttatttcttttcacccgctgcaaagagagattctcgccctcttcatcgccacttgcatcgctctctctacgaaatcatgagagggctcgttctcagttgtcgatagcttgttctccttgcctgaaagtaccttaaccacgccagactcaaattcggggccttcacaacgctggagttaggtcccaagtagcgggaggcagtggggaacgccttcacaacgccgtcaaagagcttccgcctgtcgacaaggcgtcttcgagcacagtcggcacttatagcggtcgtttcgcagcttcaagtggagggttctagtgaggtgcgtcggcatcggggacatggtagaattcaaagtgaaagcggggtgaggagaactacctgaaagcatagcccccgaagtttctagaagcgcttattcgcataaacgttctagtgacacgatgtggaaacagatttttgtctgcacccatgtccgaccccatggatacgtggacccttcggtgagctgtgattggtcgcatgagatggagatccggtagagacgagtgtgacgtgtggattgtggatgtgtgtggagacttggtgggacccggcgcttgcagcaagcatgggctcacaggattggagatgcgccctccggatgagcgctcatattcggtgcggagtcacgcatcctgtccgtccgccgacttccctaactgcaggataggcccaaggcgcgaaagtgtggtcagcgaacgtatcctggccactgcctgcattggctcagtcaagttgtcggaccaccccactgaatcgccccaccagacatgatcacacgcgcacaagaccctgttggatgaagcctcgtgttgtccggaccggatcgtggtgcacccggtgacggcgtaccgaatggagaagtgccacaccggatggggacggacaggatcgttcattcggtccgccccccgtgcccacactggatgtcgacgcaccaagaacaagtccagtgcgcgccgcgtgtgttcacacagcggcgtcgatccgaaccggatgagaccaagatcccccaagatccacaggcggcaccgaatgagccgcagatccaagggagaggtccagttccaagacgaagagacggtgtacccagatacctccgtcatcatctgatgagtgtacccgaacaagtgtcgccgtcaacaagtctccgcataccgaaaccaagacaagcatactgaagaactgccaagaagcataaacatactcaagacaagcgaagcatagtgaaacctactttaaagtcagcgaagtgatagaagatagctagccaaacgtaagatctaaacagaaaccaatttgccgaagaacacgcggacgactctgtgctcgggaccccgactttggcgtcttcaagagccctccaggagactgcctgcgcgcggtctaagccagtttagggacgcttccaaggcctcactggtgtagcgagcactggtgtagtggggactcaaaggtaccaaggcaaagtcggcagtgactggggtctcgcaccccggagtgacctgtgagagctttattttctatttgcgtgctctaaccgggcatccatttcatattccctactgtgtgtctttggtggttgaggtagtcacccccccccagaccgaattgattgactactgtgtgataggactgaattatattttgttttgttccctcattctgtgagggtggtgcgcgtaagtgagtgtgcatccagggctggccagtgccttgggtgacggctccgaagttgactggtgtatagaccccccacccaagggtctcaaagaataagtggtggctgtatattttgtgatgtttagctcggcattgtatttctgtgtgttggttattctgaattacggatctgactgtggtccctttcattcgacctgaccttctgttcattcggtgtggtttatcccaggaacactttattctgtatcgcaacaactcaactcggtgaaatccggtccgccaaaggtaaacgatacctataggggttgacacaaggacacacgccaaacactggaccgcattagtgcgattcggtgcgtccaagcggttccaggcccgggtcattcagtgtcccgtggactgcttatcgcgtggacaatctctggtactccgaacacgaattcattcggtccggcatagtgcgctatacaccctggacgaaaaaggcgttcaccctcgcctcactaaaatctgagaaataccgattactgaggtcgaccacaataaattatttcagtggttttattgcccaactttttttattttatttactgattccgagctctggttgggaatacatgtacaattaacagttagtagtcgtagttatttttctaccgaaaccaagatttgtcaacttacctgtacagtattctacaacgatgcacatcattcagcatttttctctgcgactaacacattcctctcgccaagactctccaaccatgccgtctgcttcattcaagtccaccgtcagcgtcacgcacatcgctacagccacggccatcttgtccatcgacgacgtcaacttcttgatcgacccagccttcgacaaaagcggcaacttcggccaaaggggtggatttgtactcacgaagactgacgatcccgcgctcggactcgaggacttgcctgtcatcgtcgccattctcctcagccacgaagaccacgtcgacaacctcgacgcatccggtcgcacaatgctgaatggccgccacgtcttcaccaccctcgacggtgccaagaacctcgctccccgcccagagtcaggaccacgaacatcaggccctgatgttcgtggactggcaccctaggtcccagggcctgggagtccacgacggtcacgctgaacggcatgcagttcaagaatcttgatcttgaatcaagatcacgggaacgcccacccagcatctgcctgacggagagtgcacgggcttcgtgctcgagtcaccctcctttggcgtaaacgaggcggacggtctgccgaacgttgtgtacgtgtcgggcgacacggtgcacattccgcaactggcgaacaagcttccgaagaggtaccacgtcgtggtggcgctcatgaacctcggcaaggccatcgctccactgccgccgggtcctgtccagatcacaatgggaggcgtgcaagcagctcagctcactcgggatattggcgcagagaagatggtgccgctgcacttcgagtcgtggaagcacttcacgcagtccggcgacgaggtgcgtgctgagcttgcagcggatgcagctgtgaaggacaaggtcgtctgggttgtccctggagtaaggtcagtcattgtgtagatggccacatcgagacaaatctacgctatcggctgggtgcagtgattgctaggacagcaaaatacttccaaaacattgatcgctgctatcgaaagaattgaacagttccccgtttccagcgaggtgtacgggtatgatcttccttcactcggcgtggaaatagctgtatcagtactctgaggaacggacaagccatcatgctgctagtggctgccacaagaatggccctgccagatccaaatgacgatgccaatggttgctgtatactagtagtacaaaactcagttattgtacaaaactcagttaatgtgagtgatgcctcgtgatcagggttcggtagtactaggacaaaaatcaccgatatcagtgatattatcactgatagtgatagtggtagtgatatatctctgagctcggaccggtgatagtgataatagcaataatcgcataaaattgtggcggtatcagtgataatagtagtgatattatacagaagttcaacctggggaagatcttcaaaggacgcgcgtatgggtggttctccaactcacaggctgggtcagtttcgctaatttttcgacttttgccccggacccacgactgatgaagtgcgcaaagattgactgtctcaaatggtagagcgctcgcttagcatgcgagaggtacagggatcgataccctgcttctacactgtgatcaatgttactgtgataaaatcagttggcatcagcactctcccaaatgcgcacttcgcggttcttctgcgagacccgctgaccttgagtaacacttttgcacttatgagcgcttttcgcttagcttctgacaccccgattttgactgccgtcttgcttgtctgtgcatgctcggttgctcgcgttgtttgcgcgagtttcggtcccttcgcttcgcttcatcggtcgcctgttggcgtctttctcgctttgactcgcccggttgtggcggggtttaattcgccttcggtgttccgtgttaccagcacggtgcgtgcagttcgagcttgggcgtctgttgaaagcgtggcggtcgattgaggctctggctctcgcgacggtcggggtgcggcgcagtgcggtgagtctatctgcatcgggttggtgtggtgcagattgcgcgttggattttggtgtgtagagtgagtgcggagttaagggaggaggggaggcatgcggacagatagcgtggtagcgttgtgtcggtctgaggtagcgtggtgtttgtggtgcgtgtgtggcagcgtttgtgtttgggtagaacgcgtaggttgttgtcctggggctggcgactcgccagtgggcggcgagaggttccgctcgtgccggccgagatgaggctcataatgatggacgagtgatagcgctcttctatatgatctgcttaggtcagtacttcaaagttctactacgtctgcgaggagtcacagcagttgcaattgccatcaaagacaaactggagcatgctctctcgtttcagattcggcatctcggttgaatacagggatgagtattatagtgcgttttaaaggtatccttcatgcacgagtatatgttgctagcaacccgtgcgcggcggccgcggggcggagggcggctgcacagccgctggttgccgcaaacaacgtggcaggcaggctagctcgccggcaaggcggaaccccccccctaaggggaacgatttgattggatgaaaatatgcatcctgagatagtgaagctgaaaaccgagttgagcaaaaccaccactttgctaaaacggaattgcgtttgagtatcagatttgagagactccaatcacggtactcctccaaactgaaaacgaatctgaaactcaactaaaatcggtttgcgaaagttctctattgttttcacttcaacagcctggtacatcactgcagcaatgagctttgcatcaaaacctcttgaggagccataatttgatctgctagtgatagagcagcaaacatgcagacgcgtttgcaaacaagacttacagtaagttagcgtgttgtgaaaatcactcagtggagcggccgcctggtacatcactgcagcagtgagttttgcaccaaaaccgacatcgatctctcacaaatgtactgtgcctcgtcatcgatcacgtgtcacgaatggggtaaataataatgataatgttgaggtggattgagttactggctcacgccgaacttataataccccttccgcctcgtatagaatggggtaattgggggagacatcccagagacatgccctcgctgtgtgtgcggtagtaactatttatcttgagctaaaaagagttgaaggactttccacttgtcggatgctgacttgcacgcgaaggtcttctacggccgcggttcgtacgttgacaacgggcgttacttaattgtgcgtacacttgactgacttatgagtgattccacataatgtgacttaggaaagatgccacgtccggcatctccatcttggaccagactggaggaagaaacaacttgaaggtatctgaggagtaacgcatcgatccacttatgcgagagggagtaagctaatagagaattgaagcatcatctcgcagaaaaaaagtttccctaagggtttgtagcacgttatttgtgttcgtgaatagcatctcaacaagcaacctctttaaaatggagtcagtagtgtcaagttgacgcaccgcacgagtttaaatgacgtttacgtactcggaagtccgagcacattactcagtactcgaaagtccgcgaaatactcaaatgtaaggcgacaacgggtacccccactggtgcagccgcaaatatataggttctgcagtcatgcatgtgtacgcacgttcttcaacgacgagagcgattcctacccagcacaacgaaagagcgcacagctgattctacgtcacaaccgagatgagcttcggcgcatggagaagagcaagcggcagatctggtgaataagtctcgttctcagcatacattgcatactttcaatacatgtacctatttctggaaaaagttacatacgcagtatctttttctgaaaaaaggtacatgcatattttaaatacacaaaattagttgagtgataaatatcagtgatattatcagtgatagtgatatcgtcgtcgtcccactgataatatcagtatcactgatagtggtccaagattggatattagtattagtatcacggatagtctagaattccactactactgaacgctcgtgataatgcatgcattactacgtatagtcgggtagtattatagctattgcgtagcagtagtttcactattatttatgtatcccgaacgggaattgtccaggggatattttcacgagtacaggcagggttctgcagcggcgcggttgcgtgtcctaccaaaacaacctctcatacgacacctgccccgtaatgctagtcgcaattcacggctttgggcacgttgattgacaattcgctgcaaaccaacgcttgaagctagtatagcagcgacggaacgactgcaacgtaaggtcatccagtgaatgttgccatcagttgcagtttactcggtcgtgatcagttggcaagccgccagcctacttacgtgatcatcgcgccagtcgttccgtagctactagtagtaaaaggtggtcacgccgctgactctgcggaacagtacagtatgaatattcaatatgccgttatttgcgtcaatttcttcggtgataagcatcacagtgcagtgtaataggtttttctgaccagatgtaatgcgagtctaccgtgtgcaccaacattcccagatgataaggatgaatatcgtgacggtgccgacatgcaagaacttgacatggccactgtatggcggccatggcccaatcagatgtccaatacgttttttcagcgaataagcatcccgtagatccctatttaggccaatcaacatggttaggggtaggtatatttgctgccgacactatgccgacgtataatgccggcaacgcggccgaaatatgtattcatcccataggaaatctaagtaatatggatataatatacatatctgttctgctgccgacaagttacttagcttttgtattgcctttgacgagctgatttgagccgtttgcaatagcgtttcaaccattatcacgaactcaatcgagtttcctgggcacgcctatcgacctacccataacatgaacaagcagcactcagtgagagctgctcattcaggagtgtcgctcaggcggagcttgctgcataccgcacgagcgaagcgctaggatccaatgcagaatatacaagaaaaccattaatttattccatttattatcaataacttattcctactcaagagtactagacgctagtggtggggtgtgactgcggagcattccacctgcagcgataccccaccaacagtgccagtccacacagcagcagcagtaccccaccagcgtcgtgttgttggtgccaacaccagcacgcaagccgcagcaagccacagcagccacgccctcctcctgctgcacgcttccctatgctcgtcgcctcccagcaggtcgctgcgcccttgcgctcgtttccctccgctcgatgcccttaccgccctcgccttggcggctaccctccccatcgccccacctccggtccgccgcctcttgccgttcgctccggttctcctcctcctccttcccgccgtctatcctccacggcgcggccgtcttgtcctgcgccgccatcctggtgcccaccgccctgcttcaggtaaccgtcatcgtcgtgctgcgcgccatcttcctagcctccaccgcggaccactcgcctgtcgtcgtgcagcctaccgccgtcctcccagacaccacccacatcttggcaggcggaactatgcagcccccccttttcgccgacgtccttcggctcgccgccctccttgatgacccacccgccgtccttgcggcctggcctgcatcttggaattgacatttgagtcaaatgatttgaccaatagattaaccgctcaactaaatgcttatttctaccaatcacgacgctgtcggccactgtcggccgctgtcggcaccgtcatggtatgagaactcacaaaatcgattacgaccgcgtttttagagcttcgcagcagtttttttttcgtcgaacccacatgaactcgaatgcactgcttcatcattcctcatttctctgcgactaacacattcctctcgccaagactttccaaccatgccgtctgcttcattcaagtccaccgtcagcgtcacacacatcactacagccacggccatcttgtccatcgacgacgtcaacttcttgatcgacccagccttcgacaaaagtggcgacttcgaccaagagggtggatttgtactcacgaagactgacgatcccgcgctcggactcgaggacttgcctgtcatcgtcgccattctcctcagccacgaagaccacgtcgacaacctcgacgcatccggtcgcacaatgctgaatggccgccacgtcttcaccaccctcgacggtgccaagaacctcgctccccgcccagagtcaggaccacgaacatcaggccctgatgttcgtggactggcaccctaggtcccagggcctgggagtccacgacggtcacgctgaacggcatgcagttcaagaatcttgatcttgaatcaagatcacgggaacgcccacccagcatctgcctggcggagagtgcacgggcttcgtgctcgagtcaccctcctttggcgtaaacgaggcggacggtctgccgaacgttgtgtacgtgtcgggcgacacggtgcatattccgcagctggcgaacgagcttccgaagaggtacgacgtcgtggtggcgctcatgaacctcggcaaggccatcgctccgctgccgccgggtcctgtccagatcacaatgggaggcgtgcaagcagctcagctcactcgggatattggcgcagagaagatggtgccgctgcacttcgagtcgtggaagcacttcacgcagtccggcgacgaggtgcgtgctgagcttgcagcggatgcagctgtgaaggacaaggtcgtctgggttgtccctggagtaaggtcagtcattgtgtagatggctgcatcgagacaaatctacgctatcggctgggtgtagtgattgctaggacagcaaaatacttccaaaacattgatcgctgctatcgaaagaattgaacagttccccgtttccagcgtagatgtacgtatatgatcttccttcactcggcgtggagatagctgtgtcagtactctgagaaacggaagtggctgccacaagaatgacgctgcaaatactcttactcggtgagtgacactcattgagtacagtatggactgtgagtgacactcattgagtatagtatgaactgtgagtaaccctaaaccccaaactcatctaaatttccctataacttttccatacaaaatgccgaatacaagttactgcgtagtgcgccaagtcaggcgaaccctggaatggagacgaaaacgctgctcaacgcgctgtcgccgcagcttcaggcgctggtggaagcgtctttgggggccaagctgccgcctcccactgcaccgcctaagcgaacacaccaagccccacttgcccaaaatgaggcgaagacgcagccggagacgtcgagttctctggaccccacagatcgtgcagcgaaactcaatccgtcggagctcttctgtccgtcatacgtatcacgcatttattgtgcaatggtcgatgctgactgcagatttgttggcgttgtttgctacagctctgaagcaccccgagtctcctggtttcgtggtgaaggaggggttcctggggcggcagaacgcgttggcggtgagggacgcactgacggagctggcccagagtgagacgttccacgaggcaaaagtaggcgctggagagaacgcccgcaatgaccgagcggtgcgtggagacaaaatcctctggatccagactccgagcgacctgaacgccccgacggatggcgacaagggcgcgagctctgcgattctgtatcttcgcaggcaggtggagtcacttgtgtacggactcaagaaggtctcgccggagttggatctgcgcaatgttgtgtcgacgcagttcgctgtcttcgtacgtagcagcatcattatggctaacggttgctttggtttgtattgacgtggtttattgtattttattgtgtaattagccaggagatggagctcggtttgtgaagcatttcgacacgtactcgaacgcacagcgagacgaacggagcgtgatgtcaaaggatggtttggtccgccttgtcacgtgtgtatactacctgaatgacgcctgggagcctgagcatggtggagagcttcgcgttcatctgaaggactccacacacttacgagggtgtaagtgggacgttcctcccaagctggacacattgatggtattccggagcttagatgtcgagcatgaagtgctgccgacgtatcttgagcgcaaggctgtgacaatttggtattacggtaagccgccagaagcttcgttacctcaagccaagcctacagagactaaaggcatggctgtatcgcgcccactaccctcggtaaccggtgaacaggtcggccatgcacaacaagcttcaattttcgtcgctatcccgagttaccgcgactcggaatgcagacacacagtcgatagcttgctagcacaagcgacatttcccggtcgagtttccgttggcatttgcctacaggtggacgatgacgacgatacccaagcgtatctcgagaacaaatacgctacattccaggcccgagtgcatcgggtggactatcggaaagctgctggcccgtgtgtggcccgtgcacaggcgcagcaaatgtgtcagggtgaaaagtactacctacagatcgacagtcacatgcgtttccgtccagggtgggactgtttcttgatcaacgagctcgcaaagtgtccaggatcaaagcccattttgacgacgtacccactcgagtatacgctcccgaacgaggtaaggctcaaggttttttccgcgttggccaatatttctctgccaattcctaactttgtgttcttaactaactgtagatttcagcggaatgtcgccccacgctgctctgtgcgtcagcgtttgacgaccacgggatgctgcgccaaaccagcaaagtacttgcgaaaatatctaccgagtgggtacacatatcgattttttcagtgctcgctgctgctttactcggctgttgcgagctcacgctactgtgcatgatttgatttgtttaggccggtatcttctcttttctgggctgctgggtttgcattctcgtcgtctgcagttatcgaggaagtaccatacgatgattcgcttcgcttcttgttcttcggcgaagaaccatccatggctgcgcggttgtggacttccgggtggaacttcttcgcaccttcggagactgtcgtttatcacctttggacccgagcgcatcgtcctgttttccaggagttggaggatgaggagaccaaagagtggcgtgcatcctcgtctcgatacgtgaaacacttgctgcgttctaacccgacagcgaaaatattggaagataccccccttagtgcgggcagatatgcgctagggacagagaggagctttgagagctaccagaagcacgtcggcgttgattttagcactctagatattgagtggcgggcggagtggggggatcttgacccgattcgctttgatctgaagagccatgctgagaggacacgaacccccgcgtagacatcgtggtttccaacctctattcacaaagagcagttatgaagtgaatgcagagttgagtgaaggatcgatttaagtgtagcttgagccgcatcttggtcaacaaatacgcaggcagcctggatattccacaatcgatgtatacttctgagaagcgaacgattctacatacggccgcaagtgagcattttctgcatgagccatagtttgcgtcgcatacatgtagtttgcgttcatacttacactcacgattgcgaccttcagcttctcgtctcaggatgtgctacatgtatttcgttgtgacgccgcagtaaactgtggactcaaatgacgccatggtagctcccgaatcctcattccacaatacttattcgtcaaaacgcgcaagcctccagcatccggcacgaagaacgcaatgaaacgatacgtgtccgtagttgcgctggtgctcgcgactgcccttctagcaacagctagcgacgcgctcttgacggccgcggactccaagcatgattaatcttcaggacccattacaagactgaacgatcctccaagaagacttctaaggacaacggatgaagccaacacggacgccgaagagcgtggaaacctggacgagaaggtgttaatgaagttgagtaagctcgctgagaagatggggaagcagacattgtcgaagaagctggagcacaaagcgtggctgaaggcaggggcgagcccccagtccaaattcaaagagtacaactggaaagggaagacttgggaagagttgcagcaggacccgacgtacatccgctacctgggattcgacgagctgtggaaaaaagctcaagaaaagaagggcacgctgtatactgttgatgcttggataaagatggcgaaagaggaagcgaagaagaaaggtgctattcacaaccagtgagtattattgtttttcttctgatcgtgctatgatagtggcgttcctatgctaaagcacattttatccacagttagcagtacgtacctccttcgctggtgcatccaacttggaaggatcttatataatacgtagtacgaccacacaggaggcactttgtttacggttgtttcttccacgtgagcggctgggttgcattttcatgctgttgacaacagcgacagcgccatatacatgaacgtcacgtacagtgcaaatagcaaatgtttttatggtttcgtcaataatgacctacgatatctactgtatgtggtggttacaacccacaaaacaattttgcttgtgccaacctcggatacattgcactttgaagcatttcacgtcgttgcgggcgtcgattgcctaaccaatgccgttaattgttgcgcatttggggatatgtgacttctcagatggcggagctgtttgcagacgggcaaataccctggattttgcactcgctgcaccttggtccgcgcggaaggcaaatggtttgtcccaacccaacgaggagaggattgatagggccccagtgctccttcggcaaccagtcctccagctcctgcagtagaatcccagcgtcaaacaaagaacactccagattaccaaaaccaatctatctcatgtaccgctcgcgttttctctgggtcctgcgactttgggttgttcttgttccatgttttcacccacttgagtcgattggaaatccgatgcacatgcgtgtcaacacaaattcccacagtactgcgatagaagttagcaattcagcgcgtatgccaaccaaacactataaggaacgcagccgtacttattccacgcgcagttcatgacaagcgtcgccatcttcggtccgactccgggcagtgcaatgagcccctcgtacgtgctcgggatatcgacaacatctttaccctcaacttcagcctgcttggtcaagatcgcagcagtctgcttgatgtactttgccttgtggttgaagaaaccaacaggtcgaatcagctgtgccagctcctgctggtcgatctcaagcatcgactctatcgtcaaccctgcgcaacgcaacaacggtcgccgcaatacacaacagttggcaaaagataccgacaacatgtacagcgtaagccgcaccgtgcttaatgaggcagcccattgccgcggcgttcaccgggtctttcgtttgactgctcatcatcgccgctatgagcacgtggaagcgacaaacatgcggcggaaagctctcgtcgaagaatacctggcggtcgtaaacaaacaaacaaacaaacaactcagcaagactccactccgctccacaacattgcaactgcatcacttgtactgtactgtattgacgcacctcacagccatacttgtccacctctgcgtccttgttcgcccgcatctcctcgatccctttcagaatttccctccagccgcttggctcttggcgaggcacgcgcgtcttggattcctttgccttcttggctctcttcttgggtgcagcgtcctgctccaccttttccaccttctctcgcttcacgccgacagattcctcggtcttaagcctaacgcgacgtcgagaaggtcgcaagggctcctccacctccaccttcacgaccacaggcttgctctcgaggctggcatccccgtctatagggccgctgctgcgtagacgcatccctgctagccttgctacgctgcagtctgtgaggctggaggaagcgagagctcgtcggagagatcgtctcgccacgcctcaataaaactgcaccaccacaatggcaattgtagggtttgaagtgctacaattagggttttaagtgatagggtctgtcagaattagactaaacagctcttagatttgctcacagatcacaacgccgttcacatctcgccatacgtaatgcagcgcctgtacatttgcatctctggattggtccttggtgttgaatcgtaggtaggaggcggtggtgacggtgttttggtgaccaattcatttgacttcgcactcgccaattcactgctcagcacacaagaggtctctggagactgagaggatgctacggaccattgcgctgctgctcgtgtttgccctcctggcagcagcgagcgaggctgtcttgaggcccacggaagcgggccaagtcgaggtcgcgaataggcttaggaccagtccgaagaggctgttgagagcagccagcacgattattgacgacgaagagcgagcgattataccagtaggagagcagacactgctgaagttcagcaagatcgtggggaagaagggcatgcagactctcgcgaagaggctggagggcaaggcttgggaagtgggaaagaaggcggaccacaaagcgtggctgaaggcaggagcaagcccccagtcgaaattcctggaatacaagtggaaggacaagacttatgaagaactgctgcaagacccgaattatattcgctacttgggattcgacgagctgtggatgaaggctcaacacaagaagggcacgatccaaactgctgaagcctatttgaagaaggtgcaagaggacgcgaagaagaaagctgccgggtaaaatatacaacgtataattcatattgtaagattggctatttcccttatcgttcgttcctgcacgtgagcgtcgcggacacgcgttgacagcaccgagctcgtactaatacgaaggcgcttaccggcacagttttcatatacatgatagttttggcacttcctcattagaactgtttgagcttctttgctttccacgaccaggcacttcgtcagcattgttgtccaccagcaaaacttcataacgtatggaaatgatgatagcttataggtgtgcaccacatcatacttttattttatatctccaatttgggagtcgcaattattcatccagcagccgaagagcgatgccgaccgcgaacaagggcgtcctcgtgaaatggtacgcgcgtgggtctctgggtgcgattaagatgtccaccacatacagtacttccgtgtacctgcctcgtgtcagccctcgatggctctgacccacgacatcttgtctgtattttcgcagcgacccggcgacgaagcagtatctactgcatctcaacgagacagcagtgcaggtcggtgaattcgggctgaatcgcagtaaatttacactaaaactgacgtgtatggattgcaatatttctctgcagcaacgctttgtgattgaagatctggacgacaggcatctatttattgtgccagaccccaaggtcatcgccttcatcgagaagaagatggacgagtggaacgagaagaacacataccagccacccacgcagtaacccagatacagccctcttgcgccgcgattgatattccggagctacctgtgcagaccgaatacgaggttaaagatcaatgcacacgacggctgctcggttgctatctaagaaaatggacacggtgggtcaactggatggcttggttggtatattgtttttaggcaaaattgcactggatatcccttctatctgctacagctattgcagaggatcagtgggtggggtagaagacacccttcttgaccacgtgctcgatgggagggtcgcccatttcgtagatgatctgctcccactggttcgcgcgcatcagcaccaagtcaccctgcttgccaacttccagactgccgtgggtagccgaacggttgatcgacgcagcagcattgatggttgcgcccacgagagcttccgtcatggtcatgccgaactgcacgcaggccatgttcatggtcaacgccatggagaggcagtgtgcgttcgggttgtagtcactgccgagagccacggggacaccagcagcgatcatgtcacgagccggagggttgggcagcttgaggatgaacttggtcgtcggcagcagcacggcgaacacaggctccggcttgtgggcagccatagcctgaagatcctcgggcgtcagcatctcacagtgagagatggcacgagcgcccagatcggcagccattgtgccggactgcatggggtgcatctcgtctccgtggaagttgatctccagtccggccttcttgccagcctccaagatgcgacgagtgtcgtcgtgctcgaacacgcccttctcgcagaaaacgtcgatgaactcgggcgaaatgtggccgtccttcttggcctgcacgagtgccgggatctgcttgttcacaatgtcgtccgtagcagcggcagccgtcattccgtccggaaccgagtggccacccaggtagttggacacaatctcgaccgggtgcgcgtcatcatccgtggacgcagcgtgcagcacgcgcagcatcttgagctccgtgtcggtctccagtccgtagccgcttttggcctcgatgagcgtggtgccgcaacgcagcatgcggtccagacgcgtccgcagcagcgccgacagctcggcctccgagctcttcttggtgtggcgcacagtgttattgataccgccgccactctcgtgcacttccatgtacgtggcgccggccagcttcatggcgaactcgttgacgcggttgccgctccacaccgggtgcgtgtgcgcgtccacaaagccaggcagcaccaccatgtcacgggcgtccacatccttctcgaaggtcacgggctgcggctgagcgctcagccacttctccacgtccgcagcggggccgacggacgcgatcttgccggccaggtccacgaccagcgacgcgttctcgagcacggccaggtccttctgggcggcgccggccttgaacagttcgccgtgcgcgcagacctgcacgatctggcgcgcgttggcaatgcgcaggcggaaggagctcatggcgggggcagcaactgatggaaggaggcaaaagcgcgaatggtgcgtcaaatcgcccacggcaagtacgtgtacccatctgctaggatgttgaagagcgtcgggccaatcaggattttacaggtctttttcagccaatgacgcgagacgtccaatcaattccttacatcagtgcattcaagtgatctcatgaaccgcccatctcctttaactactgatgcagagataataaggtaagattatcattgacactttgttaatatccccctacatggctacatgttcaacggcaagcaatcggcacggaccgccattgcagtgcactccattcttgttttggctgtccatgcgctcagcgctcattcgctctttgcgtagctcgcagacacctctccgcaaccgctttgctctccgcagccactcctcgttgaccatgcagctcccgcagtcctccgccgcgtacgtgctggcgcccgagctcacgtggaccggcgagcagttcgagcgcgacgtgcaagtgtccgtgggcgccgacggcctcatccagtccgtcacgcgctcgcaagacgccggcaagagcgacgctgcagacgtgcacaagctgccgggtcgcgcgctgctccccggcatggtgaacgcgcactcgcacgcgttccagcgcggcctgcgcggcctcggagagacgtaccccaagaactcggcgcagagcagcttctggacgtggcgcgaggagatgtacaagctcgttggcggcatgagcgagcagcagatctacgacctgacgcgccagtgcttctccgagatgcgcgacgccggcatcacgagcgtgggcgaattccactacttccaccacggccggccgggcgagggcaagagcggacacgagttcgcctacgatgagacggtgctgcgcgcggccaaggacgtgggtatccgtatcgtgctgctgaacgcctactacgagcacggcggcttccagcgcgcgccgatggtggagtcgcagaggcgcttcaaggtggactcgcacgagaagtactggagccagatggacgcgctgcagagcaagctggcagacatcccgacgcagtcgctaggcgtggtggcacactcgatgcgcgctgttgaagtgcccgacattgtcaagctgcacgaggaatccgtgcgccgtggactggtgttccacattcatctcgaggagcagacgaaggaggtggacgactgcaaggctgcgcacaatggagagaccccgatggggctgctgttgaagaacctcaagatcgacgagaagtttacggcggtgcactgcacgtggaccaaggcggacgagctcaagcagttcgtggagaagaggggcaacgtctgcatctgcccgctgacggaggtatgcgcgtggtatcaaggatttaagtcttcttgtgttgtgtactgatgatattgttgctgttgtagggcaacctgggcgatggcttcccgttcattgcgagctgctcggaccgcgtgtgccttggcacggactgcaatgcccgtgtggacatgtgcgaagagatgcgctggctggagtatgcacaccgcctgcatgagagcaggaggggcgtatgcactgacgccacgtccgagacggatctggccaagcttctgttccgctatggcacgaagaacggtgccgaatcactggacctgcaagttgtaagtatctgtaccagccacgccaagcattcttcagttcgtgatcagttaattaacagtcttttgttttcgttgacgcagggtgaaatcaaggagggttatgccgctgactttgcgctggtcgacatcgaagaggaacagttgaagttttcgacgccgtcgtctctgatgggtgcgttcatcttcggagccaacggctcaagtgtggtgaaggcaacttcggtgaacggaaagtggcgtgagacgatctccaagaaggtcaagtctgcggcacctgctgcggagggtggtgcctctgctgcctccgatgagcacaaggctcaaattgaggctgctgccgcattagccgacgtcaacagcgacgacgttgtgaagcttgcgattggtctgaacagcattgactcgacctccggggacgaggctgctgtcggccaggcaattgccgactggctgactgctcggggatggcgtgtgcacatgcagaaggtgcctcctcaggccgatgctgcagtgaaggcggacaggttaggatgccatcaagctacctatcttgctcctagctggattgatgaacttactctgtcgtgtcttgcgtattttcaggtacaacgtgtacgcttctcgcagtgacagcaagacgcctcgtcttttgtttaactcgcacatggacaccgttccgccataccttcctcctcggatcgacagcacgacgctgtatggccgcggtgcttgtgacgccaagagtctggttgctggccaaatgatcgcggcccagaaacttgctgaggctggtttcggcgacgacgtccaagtcctctttgtcgtgtcggaagagaccgaccacagcggcatgaagaaggcgaacgagttgaacgtgaacccggcgcacatgatcgttggcgagcccactgccctgaaaatgtccaagatgcagaagggtgtcctcaagattcagcttacccaggagggtgttgcggctcacagtggatacccgcacttgggtgactcagccatcgacccgatgatcgatgtcttgtacgacctgaagaaggagaactggccgacaaccgaagagtacggcaacaccgatctcaacatcggtctgctcaacggaggccaggctgccaacgcgctggctgagcagtcttcggcgatgctgatgttccgtttggtcactgagcctgacgttatctacaagcgcgttgaggtgcgttgttgtctagcttatccgaacacgtgtgcagtttgtactcactacttttcttttacttgcaggaaatcgttgctggccgcgtgggcatgaagctctacacgtccaacgctcccgttcacctgacgaccgtggagggctacgagacgggtgtcgcgtgcttcaacacggatgtgccttactttaacttcgacggcaaggcgtatctggttggagccggcagcatcaccgatgcccactgcccgcgcgagttcatcatgctcgaggacttgaagagcgtcgttgactactacttcacgctgggtaagcggttgatcgaggtgggcaagtaagaagacagctgatcacacatagattttgagtagaggggagagtatacaagtcatacatcgtgaatgcaagctttcgcattgacattcctaccttctaaatgtccaccatttcgagtggttcagacgtgggagttgtcgtgccactggattggattgtactcggtgcttcgttctcaactgaccgtggagaccgagcgaatggaccacggtgcctggagcgatctccactgaccgagaacaggtgtcgcagccaactcgtccgcagtatctgagccgtgttaccgtcaacgcgtgtgctcactcccttttggaagcgccagtcgtcatcaagtcgatagcaacgtgaaagattttcagctttgtcggtgctagcatcaacccccttgagaatggctgtttgcccgtagttttcgcatgggtcttcgacatcttgcagccggaatgctcgaaaggtgactcgacgatagtgcactccccctgcagcaagggttgggagcagcgcacccacagccacatcgatcgccattgcgtccacttcgttgcagcttgaccgacgcacgtcgatgtcgctactgagcgatcgatacaagcgctgcaaatcacctatgtacggcgcactcagtagcagcttctgctcgaactgcttcgtcaccccaccgacagtcgctggtccgtcagctcccgcactcgtttccatcgcgaaacgcgcttcttcgcattcacttgacgacagccgccgagaacaaaccaaatctgtcacacgcagctcgccaccaaccttcagcaggctgaacgccacttccagcatcgcgttcttgctcgcagggaactccaatgactggatggagcagttgcacacagcgatatctgcttggccctgggcactcttgagtccatcagtgcccatcgaggctaacgacgaggactgatccataccgccatactcccccacgataaacttcatattcacgagaggcagccccaatgtctcgaggcaatagctctcagcagcttgctccgccaaaaacacgttcgacgggcttgcatccacgcacgtgacaaacccgtccgctcccaccagtgctgctgctacgaaggccttgacgacgctgccaaagccaacaacggctactcgcagaccagcgactccaccgttgaagtcatcgtccaaagctgagccctcacagcagcagccgagctctcgaattttcgcagggacttgctcgagcagggctgcggtggttgattcggatttggctggggcttgttgacgccaccgagctgagcacagcgctgcattcttggaagtagcatgaagtgaagatgaaggcgctgcattgccacttagagccacatgctcgctgtgttggttctcgggtgacaagacgtccgcatcaccctgaatatctgcggcgtcagcagtggcatctgaagtcggtggatggactaaggagtccgctttcgtgactgctggctgcgatgctggtagactcggcaccatcagacccgcactccacccactcaacgaagctgactccgaagccgcccctgccactaccacaaccgtttgctccaacggagacttgctcgacaccccggcgggtttccgcagacgaatgcaatgccgatgcttaaatctcgccagccaaccaacagacagcaccagcatctcatccgacacgccgtgcacctgcttcagccgctgagcctcttccagaatcagagcttcggtcaacacgcggcctccagtcgactgaccacttggctgggcacttgccgctccatcattatccggcgcagacgtcgagccgccgactccattgaccgtagactgcgccatcgggtctccagaaaccgcaacactctctgcacccgcctcagtattaacatgacgggagatgaacttgaccaggtccgcctcgaacgccgggaagagcggccggcggcggcgcttcatgttggggttcctgggcgcgtcgccgccctgctcgccgctgcgcagcagcctccagtccatggagatgatcttggacagcgtggagcggccgcaggaccagccgaactgcgccgccacctcccgccgcagcgcctcctgagacggcaccagctccccgcgcgccttgcagtcgttcaccttctgctcgcagaagctcttgacgatggccttctcgcgcagcgtcagcgccgtgcgtgtgagcttgcgcttgccgccgacgtggacgctcggcgaggcggtggctgcatcgctgctcgggtcagccggtgcactgccactgccgctgctgtccttggcatcgtcgagcgcgttgtctgccatattttggcgagtggtgttcttgtagaggaacgttgtcggattggtcgaaacaaaaacttcatcagcgaatcaaaacacagtcacgacgttgaagtgcatcttgaaaccaagtcaagtcggggcctgtcacttccaccgacgccgaagtctccaagagcgtagatgagaggaatcggtgcgatcccgctgaatggagagaaaaggtaaattctggagagacgatggcggtgggtctacggactgatgatccgaccactcacttcgcgtttcgtgcccaagcactcaagtgtcctgcaacccaagacctgctgctaccatgatcaagcgctcgatccttgttctgctgctggtgctgatggctgtcctgagcttcgcccacgccgacgatgcagcccccgctaatttggaggatctcccgcctggagtgtcgctcgtcggcggccaagaaccggtcccggttgcgcgcaaggagcagctggacgagcagttcgttcccggcggaccggccttcgtccccggattccgccagcgcttcagattcccgtggagcggtggtttccgctacggctggcgcttcccgatcggctactggaacgcgttcggccgcaacatcttcggcccgagctgcctgtttgctcgccagtggggtggtttctggtactgctaaactgccataccgctgctggtggcatggggaaggtcctcaggaggggaaatcccacacaaaaacgactgctttgatatgacgctactgaacgagaggtgacggcagtttagcattttaacttgaaaaacaagcattatcgacttgaaacaagctggcgctttggcttgcgaacaacatgaccatcaatttcgtgctttttttcgtaggaatactcgttatctcgaatattttatgtaaatcgtagcatcgatttacataaaatattcgactgcggctttcgatatgtcgttcgtgtgaattgtcgataacgaagaccccaacgctctcgaaaacgctcgatttgccgccacttggtcgaccagtgcgagtttgattagcgcctactccaggcagacctttgtcatgtgccatagtggggaaatagttcgcgacgcacacaaaaacatcgctctacgaaaaaaagcacgaaattgatggtcatgttgttcgcaagccaaagcgccagcttgtttcaagtcgataatgcttgtttttcaagttaaaatgctaaactgccgtcacctctcgttcagtagcgtcatatcaaagcagtcgtttttgtgtgggatttcccctcctgaggaccttccccatgccaccagcagcggtatggcagtttagcagtaccagaaaccaccccactggcgagcaaacaggcagctcgggccgaagatgttgcggccgaacgcgttccagtagccgatcgggaagcgccagccgtagcggaaaccaccgctccacgggaatctgaagcgctggcggaatccggggacgaaggccggtccgccgggaacgaactgctcgtccagctgctccttgcgcgcaaccgggaccggttcttggccgccgacgagcgacactccaggcgggagatcctccaaattagcgggggctgcatcgtcggcgtgggcgaagctcaggacagccatcagcaccagcagcagaacaaggatcgagcgcttgatcatggtagcagcaggtcttgggttgcaggacacttgagtgcttgggcacgaaacgcgaagtgagtggtcggatcatcagtccgtagacccaccgccatcgtctctccagaatttaccttttctctccattcagcgggatcgcaccgattcctctcatctacgctcttggagacttcggcgtcggtggaagtgacaggccccgacttgacttggtttcaagttgcacttcaacgtcgtgactgtgttttgattcgctgatgaagtttttgtttcgaccaatccgacaacgttcctctacaagaacaccactcgccaaaatatggcagacaacgcgctcgacgatgccaaggacagcagcggcagtggcagtgcaccggctgacccgagcagcgatgcagccaccgcctcgccgagcgtccacgtcggcggcaagcgcaagctcacacgcacggcgctgacgctgcgcgagaaggccatcgtcaagagcttctgcgagcagaaggtgaacgactgcaaggcgcgcggggagctggtgccgtctcaggaggcgctgcggcgggaggtggcggcgcagttcggctggtcctgcggccgctccacgctgtccaagatcatctccatggactggaggctgctgcgcagcggcgagcagggcggcgacgcgcccaggaaccccaacatgaagcgccgccgccggccgctcttcccggcgttcgaggcggacctggtcaagttcatctcccgtcatgttaatactgaggcgggtgcagagagtgttgcggtttctggagacccgatggcgcagtctacggtcaatggagtcggcggctcgacgtctgcgccggataatgatggagcggcaagtgcccagccaagtggtcagtcgactggaggccgcgtgttgaccgaagctctgattctggaagaggctcagcggctgaagcaggtgcacggcgtgtcggatgagatgctggtgctgtctgttggttggctggcgagatttaagcatcggcattgcattcgtctgcggaaacccgccggggtgtcgagcaagtctccgttggagcaaacggttgtggtagtggcaggggcggcttcggagtcagcttcgttgagtgggtggagtgcgggtctgatggtgccgagtctaccagcatcgcagccagcagtcacgaaagcggactccttagtccatccaccgacttcagatgccactgctgacgccgcagatattcagggtgatgcggacgtcttgtcacccgagaaccaacacagcgagcatgtggctctaagtggcaatgcagcgccttcatcttcacttcatgctacttccaagaatgcagcgctgtgctcagctcggtggcgtcaacaagccccagccaaatccgaatcaaccaccgcagccctgctcgagcaagtccctgcgaaaattcgagagctcggctgctgctgtgagggctcagctttggacgatgacttcaacggtggagtcgctggtctgcgagtagccgttgttggctttggcagcgtcgtcaaggccttcgtagcagcagcactggtgggagcggacgggtttgtcacgtgcgtggatgcaagcccgtcgaacgtgtttttggcggagcaagctgctgagagctattgcctcgagacattggggctgcctctcgtgaatatgaagtttatcgtgggggagtatggcggtatggatcagtcctcgtcgttagcctcgatgggcactgatggactcaagagtgcccagggccaagcagatatcgctgtgtgcaactgctccatccagtcattggagttccctgcgagcaagaacgcgatgctggaagtggcgttcagcctgctgaaggttggtggcgagctgcgtgtgacagatttggtttgttctcggcggctgtcgtcaagtgaatgcgaagaagcgcgtttcgcgatggaaacgagtgcgggagctgacggaccagcgactgtcggtggggtgacgaagcagttcgagcagaagctgctactgagtgcgccgtacataggtgatttgcagcgcttgtatcgatcgctcagtagcgacatcgacgtgcgtcggtcaagctgcaacgaagtggacgcaatggcgatcgatgtggctgtgggtgcgctgctcccaacccttgctgcagggggagtgcactatcgtcgagtcacctttcgagcattccggctgcaagatgtcgaagacccatgcgaaaactacgggcaaacagccattctcaagggggttgatgctagcaccgacaaagctgaaaatctttcacgttgctatcgacttgatgacgactggcgcttccaaaagggagtgagcacacgcgttgacggtaacacggctcagatactgcggacgagttggctgcgacacctgttctcggtcagtggagatcgctccaggcaccgtggtccattcgctcggtctccacggtcagttgagaacgaagcaccgagcacaatccaatccagtggcacgacaactcccacgtctgaaccactcgaaatggtggacatttagaaagtaaaagtaaaccgtttttcagggtcgcatcatactgcggtattgtaatttgtgcaccgcgtcaacagcaaacttcataccccacccgccttgctgctcgtcgagcacaatgcaattgaactagcttcactagtctatattgaaaaaagagagtgtttgctgcacccgactggcacatcccaccctttcaataattttcgtgttgttgtattgccttcatccgcacaggtatacataccatgtatacccctgcacaccacccatttcagtcgccattcaagatttcgacagctcgagcataaggctccgtcgcgtcgatataagcgttgggcgaagcagcgctgaaggtaatgcgaactaaccgggtgttattagggatgtcagaacgtcggagtgcgaacttcacacaccgcctctcttcgcagcgcgaagaggcaccaccagggaggacacgtcgtcgagagccttgcggacagcagcacatgtggggattgctacgcggacggctgcaccgcgctgtgctgataaacaagacatgctcgctgtgcggctggcagagatgtcacaagaagcccttacctcaaggacgccgctgcgctcgggctggacgtgtgtgagtgggttccgactgacgaaacccgactgagcgtggtgtgtgcttttttcttcttctttatagtgcttagcggttcatgtttgatagtaataatgaacctttcaaccgttagagaaaagcgttgtgtaaaccggcgttgataggagtgctgcagtgcccacgtgggtggggcgcttgcaattaatagcctactaagtatcaataatagggtagcatgatgcgcgttgctgttctattgtgtttccgactctagagacacacttggcggcaacgtacacgttgctacatgtagtgcagtgatcctttggctcacaagttatgattgcatactgctgcgttcacacacaccgactgaggcagcccgactgagtccagtacccgactgacccgactgagtgagtcggtcttttattaggtggtttacacaacttttgctgtccagctatacactagccaatgtatagccaaaacccggctctaaccccggctctattttcagtcgggttgagtcggtctagtcgggtgtcaaccccagtcgggtgcagctgcctcatcgcatgattcccagtcgggtgcagcaactagtgccttgaaaaaaatctggcatccgtgttcagttgtcatcaatgtcgcatttctgtattacaggctgtaatttacttctctggcccacataagaaacaacacttcggttttctggacataactatttactaaaaaatcgtttggcgactcgcaatacctcaaccgaaagctgcgcatttgctccgtttcacgctatgatttaaaaaaatctagcagctgaaagaaaagagaaacagccttttatctgaagtccgttttagacaacattaggttttttagcgaggtgccgtcaaaattagcgatattagaaaataaaatatcaccgtaatcgcgagtgactgctttacccttatgttcggttgtcgatgttgtagcgcctgttggagacgagttagaagggctacagttttgagggttttctacgcgattatctcgacatgcgcagacccatttattttggccaatagtaagctgaaacagttgattatacccaatcatatgtgacatgtggtccacatcaaattgaggtttaatgccgaatgttgtttcttaagtgggccagagaagtacagtgtcaattcgttgtattgccacagggagcttacagctatcgcggagtcaacgacgccgtggccgttcctgaattcctcattccgcaatatactccccagtgcacaagtctcgagtctcctgcaacaagaatgcaatgaaacgatacttcgctgtgctagctgtcttcctagcaacagcaactaaggcgctctcgacagccgtggattccaagcacgccgatcccttcggtgctcgtccaacgaggtttctgagagacgtcgcacttactgaggaggtgaatggtggttccgaagagcgggggcttatggaccaactcgcgaagaaatggcgctcgcggtccagcacaaacaaccagctacacaagacttggctcaaggaaggagaaagccctcagtcccttttcagacaatatggctggaaggggaagtcgatcgaagaactgaagctggacccaaactaccagcgctacgaaggtttcgatgagctgtggacactaaagcagcagaagaaggggagtgtactgacgcccgagaaatgggcaaagctcatgaaaaaggagcagaagaagaactgatcgtaggctagcaggtgctttttgaatagagtttgtggtttgttcgcttacaacctatggttctctttccctacgtacgatatttgctaccgtacgagccagcatggcccgatcgttttcgcaacagctacagtaagaatatgcacgttgcaccaaagttacaactcgacaaagccgcttacgccattcacaccaagtatcgcagcatgatgccaatgatgcaattggccacgaccacgacatcgaagagcgctaccgatcccaaacaccatcgttccgacaatgtcgatgtcgaatcgacaccactggtgaccatcgcagattgaccagatggagatgcgtaacaaaagatcgccatctcttcaactcttcaacttgcacaagtcacagatatgtgggccacatttccttaccttcattgagcaacttggcccttatcctaacgtttagaacggcgcgttgctaaaacaggcggaaagcgtttcggccaatcaccgcatagatagcgtgaaaaaaacagccaattagaccggtagaacacgccgtccaaagcagtggtgcagatccagcagcttcactgacgtcggcacctccccattccgcatcaggtgtccaagcccccaagcgtttcctcaccgccccctcgccacaatgagccacatcctgcacgccgtgaccacgggctcgcaggcctcgctggtgcccatcaagcgcgcgctgctgtccgtgtcggacaagacgggcgtggtggagctggccacgtacctgtcgcagcacggcgtggagctgctgtccacgggcggcacggccaaggcgctgcgcgacgccaagctgccggtgatggacgtgtccacgtacacgggatcgcccgagatcatggacggccgcgtcaagacgctgcaccccaagatccacggcggtctgctgggcgtgcgcggcaacgcgcagcacgaggccgacatggctgccaacggcatccagaacatcgacctggtggtgctcaacctgtacgcgttcgaggcggccgtggccaacggcggcgacttcgacacgtgcatcgagaacatcgacatcggcggtccgtccatgctccgctcgtcggccaagaaccacaaggccgtggtcatctgctccagccccacgcagtatccgacgctcatccaggagctcgagaccaacaaggactcgttcagcacgtcgctcgagttccgtcgcagctgcgccgccgccgccttctcgctcgccgcgtcctacgactcggccatctcgtcgtggctcaacggccagctcggcaccagcgcccccaccgtcacgcgcgtgtacaagaacgagttcccgctcaagtacggctgcaacccgcaccagaacccggcggccatcctcagccgcgtgggcagcaagctgccgttcacggtgctcaacggaacccccggctacatcaacctgctggacgccgccaacgcctaccagctcgtgcgtgagctgcgtctgtccctgggcctgcccgctgctgcttcgttcaagcacgtgagccctgctggtgccgccgtggctgtggacctcgaggacggtctccacgccgcctacgaggtcggtaacgtgtcgctgaccccgctgtcgctcgcctacctgcgcgcccgtaacgccgaccctctgtcgtcgttcggtgacttcgtggctgtcagcgacgtcgtcgacgaggccaccgccaagatcctcaagcgtgaggtgagcgacggtatcatcgcacctggctacgagccggcggccttcgagatcctcaaggccaagaagggcggcaagttcatcgtactcgaggccgacgcgaacttcgcgctgccggacattgagtaccgtgaggttgctggcatcaccttcgcccagaagcgcaacgacgtcatcttctcggccgagaagcacctggcggacgttcagacgtctggcgccggtcctctgacggacgccaagaagcgcgacctggcccttgctgccatcacgctcaagtacacgcagtccaactcggtgggctacgccaaggacggccagatgattggtgtgggcgccggccagcagtcgcgcgtggactgcgtcaagctcgccggccgcaaggtcgcgatctggcacctgcgtcagcaccccaaggtgcagggccttgccttcaagagcggcgtcaagcgtcaggagcgtgtgaacgcccgtgtgcgctacattgagggcgacatggcccccgctgagctcgagacgttcaacgcgctgttcgagaccgttccggagccgctcacggctgccgagaaggaggagttcctcaataacctgacggacgtgagcctcgcgtccgacgccttcttcccgttccgtgactccatcgaccacgccaccaagctgggcgtgcgtttcatcacccagcccggtggcagcacccgcgacgccgacgtgaaggccgcctgcgaggagttcggcatcaccatggccttctccaacctccgtctgttccaccactaagttgatagacaacggagagcgatgacaaggctgaggagcagcctggatgcccccgcgctttcaattcgagatcgatctgggcgtgccctcgtgctcgcagccatctctcgtgtaggtagcagtcccagtcaccgacgagcgttcgctagcatgtaatcagttgttatactataatggaccgcatgattgctttcccaagacacccgacgccgtgcttgcttccagcgcgtcttggatacttcatgacagcgcgctacagatctgcgtgtgttgtacaatgtaaaccgcggcagtgccatggcgctctattggtttcgcgaaatggtgcctctttctactgctgtcctagcaccatggtgctagctcaccttatatctacctacctaacacccgtcgccactcgaaatcctctctactgcgtcttcttgtcctcatcgagcggcttgttgaagaacttgaagtagatggtcgagccgagcacgagcacggcgaaaatcgctgcccagatgagcttgacgtagagcgggaagggctccgtgaacatgccttggccgtgcttaacgatcaccagcacctcagtgacgacgacggcgatgcccagccatgcgcgcggacccagcttcctcactggcatcttcttgccgccgttgtagctcatcgtgaaggagcagaagatgtagtactccgccaccgcgtagcttccagccgagtaccagaccgcaaggcggtagatgttgacgttgctgctcgccggcacccacaacaccgtcttgaggaagaacgagttgagcatcatgaccgacaggatcgtgaccatcgacatgacgcgccagaagcgctccgccgatcggaagatcttccagtcgtacgccatccagtaggcaggcgtgaactgcgccagcgcgcgcttggccttgccactcaagttggggatcttgcggatgcccacccagttaaagcggcgcatctcgaagtaccggcagatcttcattcccaggtagatacccgccgcgttgcacgtgaagatgtcgaagaagaggtggtcccaccagcactcgttaaagttggcgagccagtggctgaacgtgatctcgtacagctcgaacatgacgctcaggatccacgagatcatcttgctgcgcaccatgatggagcccacgatccagccgaagaagtgcatgatcacgaaccggtcgaagaacgtcgccctgatgttggcgatgggcgactccgggttctcgggcgtgaaaacgcggcagtcggcggcgtacgacgtctccggaagtttctgtcccaggttcgcgtcgaagaccttcatgaactggcgggcgtcgctcgtgcgcaggaacagcagcacgatgagcagcatctcgtagaggatgaagagccccgtgagcagccgccacacgatcgggtgcgggcgcacgaagtgaccgtcgggcagctgcagactgcagtacgtgaggaagaaggcgcaggcgtacttgacgccgcgcttgacgtcggccgcgtactgctccgccgggtcctccagctgctgcacgggctcgtggaaggccgcgtacacgatccagagcatgagcaggaatcccgcggtcagcgtgtgcgggctgctgatccactggtcctcgttgtcgtcgtccacctccacggtctcctccatgctccacttgcggttctcgtagttgctgccgggctccgtgccgtagacctccgggtcgtcgtccaggtccgagttgcggcgggagcgcagcaccgtgcgctgcgccacctcgtcctgcatggcgtcaatgcttacttctccaacgtagctcttggctggaacgcttctggtctcaactctgcggctgaggattgatggcaagcactttttgttggatgaaaatcgcacttttttgcaaaatatgtagatcacggtacgacatgacatacaaaattcaagttaatgggaatggtggtgggatacttattctgtcggatacggtagatcattgaagcttttgacaagcatggatgaagcaattggtggagttgcaatgatgctcggtgaggttgagtgagtattgaagataaattgtcggggatttagcaataaatgggcgggtggaggtcgcgccactagctgtagtcggtcacttagtgggccatgaggtgcactgcatcgttgagtttggtggtggtggtgtgcagcgcgacgtggatgagcttcttgaaggcttcgcaggcctcgtcgtcaggcaggtcgagcatcagcgtcttgtgcacccatttgatgcagctcgcgctgtggagctctgggatgccgcaagtgagggcgagcaccagcaacgtgatgagcaggttcgagttggtccgcagtacttggaaggcgtcgcacgcgagctgctggaactgcttgtagttttcgctcttcttgccgcccatggcgtccagcatcgacggcgtgaagacgaacggggcgcgctctcgcttcacgcccagtttcgacttgaagttgcccaggaagtgaccaaagtcgatgtggaagaacttacccgaacgctgcagcatgatgttgtcgttgtggcggtcgccgatgcccagaacatacgtagccacgcagtacccagcgcaggaacgcacaaagttctgcgtagtttcaatgtcccgagtggaggcggttttccgacgccgtcgaggggacagtgggaagcaggtcgagaccgatggctcctccttggctggactgctaggcgcagatccgttgggtgacaccgagtcgagagcaatatccgtggagttcggatggctcttacccgtcggagagctcggctgcttgaacaaccaatccgagaggacaccgtcctttacaagagcgtccttcgctgcgttcagcttccgaccgagtttcgtgcgtgacttcgcatgacgcgcgtatatgatgctcgctagagtctcggagtcgccaaccacttcgatcatgccaatttcgtcgccagtggagatgcaagcgtaagggagcagacacaggtcgagacctgcctcgcgccacaagtcgtccatcacgcgcaatatctgaagaacgagctggtcctgacgaaggtcatcgccagacttgaaaatcacgtaaggccgtccatgctgcgcctttgcgctttcaaactgcaagaagagtggacgctttttcgattccatcacgcggcagctatccacgataatgctgttgcagtacgatcgcggttgcagaggaagctggaaggtgtcgggcaggacaacagcacggagggcttcgtgaagcttacttttacgtgctgacgatgacgactccatttttacgagggctgcaacctcttcgagcttcttcatgacgtacacggattgtcggatctccagcttgtagcttccgcagagctgtagatattgcgaggtgatgaggttgaagcgctcagccgtttgatggttgtgagcctcagccttcaggaaccagtagagcaaatatccgatctgcgatggattcatcagagccctcatcagtaggaaccgagccaacgccgagtcatggtaacgctcgttcttcagtgcttgaacaagctggagtagatacagctgcaaccgataatcgggtagcgcgtgcatgcaccgcacagcataagcgcgaactttggggtcggaatagagcggactcagcaactgaagagcttggagataggtaggttgtttccattgcaacaggaggcggtaggcttcgagaacctgctctcggtttccccagtcaactgacagaagagacgctggaagcagtgctgaatcgtccgtcagaatcaaccgcgatgtccaaatgaaattccgatcgtccggcgatagttcgacgagagggtcgcgtctcagtcgctgcaacagcttctgcttatctgcaggaatcgtttcgagagtgatagcctcgtgctctcctggcttttggtcactgctgtctcccttgaagaagatagacgcccggaaggtaatgctctttttctttgacaaactggagaacgcgaacgattgagggcacgaccctgaacactccagcacaatctccatactcccgaccttctggtggttgaggcgctcatgtcgtaagcagttctcgatatccagaggggtgataatggacccagcaggaagctgtaagatgtccatgagcgtagttcctgttcgcaacgtgtgtccaaaatcaaataggtggagcccactccacgcaaccacttcaccagctttagtcgtaaaggtgaacttcaagtgagagccatgaggaatatcgatcaaccgcaatcccatttcaattccaccgcttgggtcacaagtgatctcacgcgcagcggaagataaatgcgtcttgtctccgtttgagtcagcatgggattcataatgcagcagcgtgctcgtctcgtaaagaacagtagacccatgctggatgctgatcttcgcgagagtagcaggctccggaacattcagattcaccttaccgatgttcaggacgagatggcggtggtcctgcgagacaggcccttccggtggggaaggaaacagctctgtattctccaagtcgctagcggcggaggggagtgctgggggatgggaatgtggcgatacgtggaaaaagcgttcgtaatgaaagaagaggtagcgaccgacctcctccgtgacgaacttcaggatacagtcatcgttgctagtagcagataccgcctcgtggtcgctggaatcaatcacgacctccaagatgcccacgattttcgttgtctccatggaacccccatgagcgtgaactgaatcgaaatcaaagaacggcgctgcaagtatgatagtccctggtctatacagctctcgcgcaacgtcggactcagcaacctcttcgtggattaactccgtcgcgtccgtaatacagataggggcaccactgtcaagtacacgctgtcctgtgcttgaggcaagatccacacttcgccttgaaaacttttcatcagaaaactgtttcgacacaacacaaacatcttagtattagttgtagatatcagcgtcaactttaacgaaagacgaaccttgatgacaagctgtctgtccgcttcatcgagtgcataaatcctcactcggcgagccgtgaaaatggaagtcagcgcgtttttcatgcactcaagagtatggtccaactcgttttccggtgtgatgcttggaaagtggtctttgcaaaacgttttcaccgagcagttggcaaaaccgcctggctcggcagtgggaaactcgctccgctgtcggacaagactgaattggagcgcccacttcttgaaactctccatctatcatggacacgccaatgaaacgtgattagttgtggggagggggtatagttgatgacaatggcagaggttacctcgcttgactctggctcgaggtcgttcttctctgcatcgataagcgcgcagctagctgcatttatctccaggattgactagggaacacaacgtgcaatgcagtaagttatcaaacgatctttataccatcgggaatggcatccatggcgcaccttcattggtattgtcagatactctgccagctccatcgcaatcaccttcatgtctgatgcagcttgaatggaaaagtaatcgccaatgcccagtcgcagctgcggatagagttcagcttgctgtagcgccattgcactggggactgaggcctttgccaacgccaaacgcccgctaatgacgatgcaaaagtctccctcttgctgcaccgaagggctcacgagactcagcgacaacatttcacccgggcgcaagctcacacggcagcttgccgtaacgagagctttgatctcatcggccgagaacgaattgaagtatggcagactgcagatcagcgacgtcggctacaagcccaatgccacaacatcaatttagcatcttacccaatatttgcaacgattcacccgaacttaccgagatgttctgctgtcgaagctcgatctcgttcttagttcggtcgttgaactgcatgttcatgcgcttcatgaacatgagctgtcggaacgcgagcttccacttgttctctttcgtctccggcaaaggcacagtcgcatcggtggcaggctccagttcggccggtgcggcttgacgtgcctcttccggactttccgagtcttcctccgaaagctgcggcgtcttgccatcgaccaccgacagctggagctcgcccggacccactacgtcgctcatgttgcagctagcagcagagtactaagaagtcaccaaccgagtgggccctaccgtcgctttggtttggtgaacgtccgttacgctgatcgatgcaaaaatacatgagcttcgtacgtgattccagcagcataaccatgattcgcgaagactagattgtttgcactcaagcatgtgctcagtaaaatctatcgtagatccacaaggctatccgtgcctttctttagttgaggcaaaatgtcttctcttattcatatttatcacaattagaaattgatgataggtccttagaaattcacaataccgtaccgtacgtggttcagaaacatgcgacgcacttgattggctaaatatgagtatgaggttcttatagaatcagaccagccccgagccaaagcggagcgaagggagagcgagcgtctccgccccgcgtcgagcagcgccatgacgttcagcacgccgcccttcatccacttgggtatcgacgccaggaccggcaagtcctaccacatctgctcgcgaaaggtgcgtctgagaaccctcaaaacccagcgaggatccgatccaagagcgttaaaagagctcctcgactgcggtgctcaatattttacctactaattaccataattgttgttgcgttattgctttagtcgctattgtccttcggggcgatattgctgctgctggtggccatgtcgtccgagaggttcctgttcaaagtgatggtggaccggatggagtcgtacaggtgtgcacagttgaagttggactactactggagggataggcgcaataaatggactgacagatatggtgcagatactttttgtgccagctcatgacgttcctgtacattccgccgatgttctgcatcgtcagctacaaggcgacgcatgacgtaggtttttggtgggggtgattccatcgaattactgggtgtgtggatcgctgaagtggggatatgctgctacaggatctcgtggaagacgatgggatggagttccccaagtttcactttttcgtcatgggacttcttgatctccttcacgtgagtattgaggcttgctagatctggattcggaagtgtttataacgttaacaaatcgtgcttgtcgcggtgtggttgctaggggttgatgctgttcattgcaggaggtcggacagacccgacgcagacgcttttgttcatgcaagcttctatccctatatcagcttgcatgtcagcgctgttctttggtgtcaggtacgatcatatcgtagcctaattgtagatgaggggctgcaattggtgctaattgtcgatacctttttgtgctgagtagatacgcacgctcccaagttattggcatgcttatcatcacgggcggtatcatcctatcattgataccttgtattgaagagtacgtttacaccatagcaataaaccatttttcgttttgttttgctgacgtttatttgtgattcagtacccagagcaaagacttcgatgacagggagattggctggaacaggtaagagctaaagtgaagggtgtaagaccagtttttcaatgctgacggttgtgctgcaatcgccccagtgttttctttcttctggcagcaatcccgggctcggtgtcaatgctttacaaggaacgcgttattcgtgaccaaccagtggacatgtcgtacctcaacgcgtgggtttcagtcaaccagtttgtagccggactactagcagcacccctcatctttgacgcggaggtacgaagcattctctaaaggtcgttatttcgttcgcgccctgaacctcatttacttgatgttattagttccttcacctcgaccaaaagacaagcggcttgatgtgccttattcaaggagaaagcgaggtgtctacagatcactgctacgtaagtgttagtttcgtgatcatggcacccagcccaatgttctcatatctttttggtatttgtttgtttgcagctgggtcttcctatcctccttctatacgttctcagcaatatcgtcgtgaatgtgctgctactccagctcatccggctcaccagcgtttccacaatgtatgggtgcacgctcgtgggctttttgacttcatttgtggtgctggcttggtatcaagtggaccccgacaattttggcctcattaacctccatgacggtctgcggaactggatcccgccatcagtgttcgtggacgtattcgcgttcctgatcatcttcgcgggcaaggtgctttatcagtgggaccctgatccggaggtagaagcgacgaccttgtcggcagaagacaaggaggcgatgtcactactcgatggagaggacgactatggactgcgctacacgtaagacactgcagcatataataccagaaacaggaaaaggaggcgcgaaagctgtcatcaagcgcaggaaagcagttcggtcgaatgtgcattttcagctcctggacgaagaaatgaaatccgatatacagcgtgacgacggccctggctgcaaacagtataaggccagccccggtatgttttgtatattgcttgctcttctgatgttgcctgccgcctcttcgtcgttaccccaattcaggtcttctcgatttcgattcgaccgttcattcactaactgccgagcttttgaaaactcctcgtcactttgaaatactacagccaagaaccgtagggaatgtctatctcgctgaaacaaacgacagcttcgcgcctggccaagacaaagaagccgctgtcagacatgcaccagctgcaacgtgctgtgaaggagctgcagcgcgaggcggctgatcagctagtgctggaggtggagtcgcaggccacgttcgagtttctgacttcacaaatccgcgcgttgcgtagtgctttcgatacgctttcagacgtggtgatgaccgaggtggacggacttcgcaaggagacggcccgaaagcttggtgacttggacgcagacgtggtgcgccaaggggagatgcacaaggcgacgcatacagaggtgatgcaactgaagcggacgatggagatatggggtctcaaggagcgagactgggccaaagataatgagattctcaaggcctcacacagccacaacgtcgagtggatgcagcaactgcagcgcgacgtcatggacgtgaaggacaagctgcacgagatcaagagcgacactgggagtcgtatctcggagatctgcgaagaggccaacagtttgcgtggaaactggcagaagcacgtcgacgacatgctggaccgactgcaggatttcgactcggcagctcaacgacaagcgtcagaagctcgcgctcaggcgcaacaacgtgcagacgacctggaactcatggagcaagctctcagtaccgttcagaagcaacaaatgcaggtacgctcaggactggaagagcaggcgcagagcgtcgcatcgcaactcgctttgttagtgaagaaagtggagatcgcagaggtgcacgcgaacaaccaaagagcagcgcttgagcagcttcgagccaagaacgcggtgatggagaaggagcaaaggcgaaggatggacaacatcggcaagatgttcacggtgcgtgtagtgctggacaacttcaactactgtataccactaacgccgtatttgacgatgtacacgttagattttcgcggatgcgctcaatatctcgccgacgatgcttgcagcagctagttgactatttatcccaagaggaatgcacctctgtcttctatttcaatacaactccaacctggcaacgccatgggacgtcgtctaacgcgagttcatctcgagcgagatctgctgcacggccttgatgaaggcgtccacgtgcgcgggctccatgtccgggaagcagccgtggcccaggttggccacgtacttctgcgtgccgaagcgcttgagcatcttcttgacctcgtcatagataatgtccgtggacgcgtagatgacactcgagtccatgttgccctgcagcgagacacggccgcgcgcaagctggcgcacctcgacggggtcggactgccagtccagaccaatgcagtcgtacttggtagccacgagcttctcgtacgcgtactgcgtgcccttgcagaagcacaccatgggcgtgtccggcgcctccgccttgacgcggtccgcgatctggaccaggtaggggaagacgaactcgtagaagtggtcctgggtcagcacctcagcgcccacactctcaaagacctgcagagcctgagcacccgcgcgctgctgagccagcaggaagttgacgcacacgtcggtgatgccctgcagcagcttgtgggccgccttcgggtgctggtacaggaacgtcttgagcagcgccttggtgcggctgccgctgccctcgatcatgtagcacatgagcgtgagcggggcgcccacgaagccgatgagcggcacctcaccgttgatcttctggcgcgccaggttgagcgcgtccagcatgtagcccagcgtctcctcgatgttggggttcaggtcgagcttgtcgatgtcctcgggcgtgcggatcgggtcgggcagcacgggccccaccttgggcaccatcttgacctccatgcccatggcctgcgggatcacgagaatgtccgagaagatgatgaccgcgtccatgtggtagcggcgcagcggctgcagactcacttccaccgccagctcgggcacgccgcacatggtgaagaagtcgtagcccatgtcgcgcagctcgcggaactcgggcaggtggctgtcgtgtcataatacaacacgtaaaacaaggcataacttttgagtctgctgctccgttcaacctcgaagagggctcaaaacgcagctaactcaacgcaccgtccggcctgacgcatgcaccacacgggcacgcgctccgtgcggtcgccgcgcagcgcgcgcagcagcaagtcgttcttgagcttgggcagctggtccagcggcacgcgctcgagcggcgtgcgcgtcatggggaagggcagcgccttgttggtggtgctcttgttgctcttcttctgctggcgctgcacgatgtaggcggcggccgccgcggcggagagcgccacggccagggacgtcgtggccacttcgctgcccatgagtcagttaagtgtaggaaggttgcggtggtgcgggcgctaaaggcgcggatcggcgagtgcgttgcctccggctgcgagcgtgcggttatccgtaggatgtggaagctggggcgcagtccgagcgatgaaatagcgaagggacgccattggctggaggggacccgcgcttttcagcgaatcagcgagctgatattacgcaatggccacctcaacttcgcgccggtggtgctgcccacattgacgagcgtatttgacgagcgtgttcactgtaggcttgctgtgtgcacacattataggtacttatgcaagctacacaaggactgcagctcataactgaacgcccgccgacttcgcttggcggtgagcaacttactccgagtaagtatgtgtagcttcagtgcggtgcggctacgtgagcacttgaaagaaaacgaagtgcagtatcgacaaggtatgctggccttaatgcagtagaggttacaacggcgattctgcccaaaacttctctccacaagtccaaggttgttgagttttagacggctaactacttctttgaacaccgcgacccgaggatttaactccggttgttcgtatttctgcccactcgtggtccgcgtcgcagctttctcatcactcgcttaaacgcaatagagccgcgaaaactgaagacttgcacattcgcttacagaactcccagaaggcgcaggctcgcctcgacagtcaggccaaggctcacaaggagtcctaggtaacctttgaccgcacaaatcaccacgagttagatgctaccaccagacatgcatacgccccaagcaagcgctgtgctacgaaacctaccgaagccgccctgcattctcttcttcgggtcgcccgacgagtagccgcgcatgtaggcaatgaagccaagaatgcgcaccaatccggcgatcacggcaatctggggacggtagaccctgcagaagaataggtaagcaataaacgcccagcagcataagccttttatcactcctcgtttgcagcgtgaggagcagtaaaacgtacgcagacgtgagcagaagggcgaggaagagcgggatgttctccatgatgttctggtggccgcgctgcacgcagttgaaggccttggcgttcttgttgctctgctccgcgtacatctacagagcgcatcccaacaccaatccgttagctcagtggaacgctgcgccgtggcccttgcttagcagcaccaagttgcgtctcacctgcgggtactcgatcccgtagagcttgcgagccttgcccacctttatcccggcccagaagttcacaaacagcagcagcaccacgagcagtggcacgaagccgtgcgcgggctgcagctccaccagggttccagccatgctatccagtgtttcgaggctgtccggtgttgcgcttggtcagtcgaattgcgttgtgacgttggattggatcgggaggagggcgctctatttgaggtcgattacggaatcaaaatgctgtgtacttgtataagtatggtgatggcgtgaatctctataagatggtcaatgtgctgctcatgatcttgtcttcgtgtgttttaagtttttgtgaaaaccgattagtttgtcctgctgaattagccggttaaatatcgctcatagcggatttgaagactaataaatcggggatgtctcaattataatcggagtataaatcgctcaccggcagcctagcaatttcgatcaacatgcatgtatcctcggcccgagactcgccaagtgcagcgacaacaccgagcttaaacgcatctcctgcatatctcgtgttacatgtattatagcgtgcggcgtttcctgcttagttctgatgttagtgttgtatgctacaacttgtagccttgactacattgccaagagctactgtaacgattgttgtctggcggctgatttgcttgctattcagagtcagagcatgctctgactctgtaagtcgtcctaggtagtaatcttgagtataaatcaaggtactccagtctaattaggaggtcagatttatcaaatcggggtagtcggtcttattaagccactacatcggcggattaacaatccaataagacaataccttatcttcattctgtagaagcacgcgcgtgctgtgattatgggattatgggggaggagcagctgccatactagtaatcgttgctgaaggcccgaaacatcattcctttgcttgatgtatcttcattcttgagctggatggatatctgagcagtgaagtcttataacaggaacggagtcttcttggtagacctcacactgcttgataagtatctttgatccacatggagaaatgaaaggtttgtttgaaaaaaaagtcgtggagcaattcgtgcgaccactaaaacaagaagaaaattacggatacgaacaacacgctgacctagatcccgggtaatagctaggctttccatcttcgcccttgaaagaggtcacacctcacacaatcaccgtcttcacgccagggacaacccagacgaccttgtctttgatattcgcgtccgcagccagctcagcacgggcgtcctcgacggattccgtgaagtgcttccacgactcgaagtgcagcggcaccatcttctctgcgccaatgtcccgagtgagctgagctccttgcgcgccgtccattgtgatctgaagaggtcccgtcggtagtggggcgatggccttgccgaggttcatgagcgccaccacaacgtggtacctcttcggaagctcgttcgccagctgcggaatgtgcaccgtgtcgcccgacacgtacacaacgttcggcagaccgtccgcctcgttcacgccaaaggagggtgactcgagcacgaagcccgtgcactctccgccaggcaggtgctgggtgggcgttcccgtgattttgaactgcttgccgttcagcgtgaccgtcgtggactcccagggtgcaagtccacgaacgccagggcgaggagcgaggttcttggcgccgtcgagggtggtgaagacgtggcggccattcagcattgtgcgaccggatgtgtcgaggttgtcgacgtggtcctcgtggctcaggaggacagcgtcaatgacaggcaagtcctcgagtccgagcgcggggtcgtcagtcttcgtgagcaggacaccgtcacgttgctggaagtcgccatggttgccgaaagctgggtcgagcaagaagttgacgtcgtcaatggtcaagatggccgtcgccgtgctgatgtgcgtgacgctgacggaggacttgaaggacgaagaccgcatacttagtcgaggagtcttgggcttgttggttcttgagagaattgcggaatgaagtggggacacgccggtgcaaattaaagccatgaaacatggaacttgcggtcgcaatcgtcggtagtcagagtggcattgacttcgcttgaagtggtctgtacaactgtgtcatcgatgacaagttgtcattgacaaataatagtttaatcgccttcatgtatgatcaccaatgcatgtaagttatagctaagctgtccgcagctttgtcgtgttcattcatgtatttgccttaagatttatcctttcaaatgattcatttggtttgttgcaatgttggttgctctcctcgtcagtgcagaactgattgtggaggtttgatagcagccttgtactacatgaactagtggtggtttgggccgagcgagcgcaccatgttccctacgggctctacgaaggcagaaactgttgtgtagtgcaaagaaaaataagttcactgttttcattgtgttcatttgctcgtgtacaacagctatgtagtagtttcacatgcatcaattacgcgcggaaaccctggagccttcaatcgtgcggtgggtaagcccaaatccactggactaccgtgtccacctccaggttgcgccattcttcctgaaatcttgttgttggcaacttcagcagcagcttcctgtcgttgctgctgtgcctcgcagcactttccctcggatgctcgcgaatatcaccggcgtctggtagcagcgcttcatgtacgttcgcctcacactaccccttgaatcggaggcatcatgagcgtgctcgccggtccttcatttctcgtgatacttcacacttcttctcttccatcttgctcttcgtctcttgtactagttgtcgtctgattcatcatcacttgtcctcagttgctgctcttcatcctgatcgagcagccactataggtgaccaagcaggcgtagtgcagcttccaaagagagtcctaacatcactagcgtgccgaggtaacctgcagaattaaaccgagcaaacaaaagtattagaattcaagatcacatgatagcgcaaaatagcggaataggacaacgtaccgaagttcccctttctccttttccctgggtcaccggttgagtagcccttgacgtacatgacgaacccagcaatgcggaccaatccggctgctgcggcgactttggggcggtagatcctgcaaatcacatcagcaaacgtcctcgtcagataaacgatagctggcaattgcaagccgctggtcacgtacgaggaggtggcgagcatggcgtagaacagcgggaggttctccaggacgttctggtgcgcgcgctgcacgcagttgaactcgttggcgttcttgtcgctcttctcggcgtacatctgcgggtacggcacgttgaactgcttgcgcgccacgccgacgcggaagccggcccaggtcccgacgaggccggcgccgatgactacaagtgggatgtagccatgcgccggctggagtgagactcgcactgccgacaccgacattcgatgggagtgcagacgcgtatgcaggtggcttggtttgctgcgggatggaggggcttgcttgggcgggcgcaggcaaattccgaagtgatctcgccggcatgttggaattggagaccgatgatggggcagcgccgcgcagcactgttcttcgtttttttttgcattcgcggtttcccttatctttgttaaacgacgaccgcgtacccccgcccttcgctgcgacggctctgcaggcgaaagccctatagagctgcggacgtatccgagggggacggcgctgatttttcgcagccgtgccccctcgttgaaccaggcagaagagcccgataaaaagatacgaggagaagaccatcaaattatttggacaacgggccatgacgccgggcacgggccgggcacacgacacccgaggaagagtccaaatagcgtttcggcaagaagaattcttctgcagtgagaaattccccttttgccgttgagcgctttgtggctcagcgcccacgcagccagcaaggttggagaccgttctcaatgttgttgaaaattgtacagttgaagtggcccagcaggcgaagcggcgccgaaggttcgtcccaacgtatctttcgttggccgtagcgacactttcgtgcaattgaatcgggctgccctgcccgcggaccttgagactttcgtcccaaggtcggagcgctgggtctcgcgggactctcgccgcgtgcaaactttgcgcattgcttggagcctccgaatcagagggatcaatgcgggtgcctcaagaaacacgcggatcccggcgatgtgcactcgctctgctgcgggcttcaactgattctagtacagggagctcctattcttatcctccacttcaacttgggcgaggtcgtttcatggttcttggagagggaggtgctcgtcctgctttgcgcgttgttgcctttgtttgctctcatcaaatcagcatggcagcgtgagttggtggcaggcctcaagtgacgagatcttgcaatgttgctgacctaactcggatctttcgctgtcatttgatgcatccaagtgcggcggtcaagaagctatcgcgctactgctgcaacaactgcggaggggcagagctctatctgtattgctgggtaggtcgctgcaattagttgcctagaatgtcattgcttgaagagctgctgacatggggctcttgggttgcgatggtgagcagaagggttgtcgacacgtgcaaaacatcaaggtatgtctgtcgtgagcagggggggggtcaaggatcggtttgctaaaatggagatgtgctgtgcctcccagactttttacgccgagaacaagtccattcaacaagagctcgagatgctgcgcgttacaatttatgagcaggaaatccgattccgggagtacgagcagcaactggtgcgtgggatcggatgcgtggttgtttttatttattctcaatgggtgttgttgcagaaagagaagcaagagagcttggagtttctcgtggaacaaataaggaggctaccaagttattatccaccgcaatggtccgacgattccgcgtcaattccatcgggcttgccgtcgtggtcgactgtcgctgccaaaatggtgtggcagcagttcgatggggatcgtgatggcaagctaaccactgaggagcttcgacaactcaaagtaacccgatgtcaaagagcacaacctgttttctgaaatgacggactaacgcgcttacttctggattaggaccagttaagatcaagtcacgaaaatatcgacgacattctgccggactacccggagaatccgttgacttctctacacttgctccaactgtacgaatgcggagagagctccaagctgtcggatgatattcgctctcttgggattttatgcggtaggcttgatcgttatcgacgctaataaatcagcgctaaattatgtatacatgtattttcgacttgcaggatcatcggaagccttggcggaatcgctatcgacttcagatactgctctttgccgcattgtattggaatctcgggtacacgaagaagtgctgtggtgtggcgagtcgcatattctaacttactgtgcgttctaatagcaactgcaaaaggaacgagacaacttccagaacgaggttgacgaaagcagggtgagtttgaccgaactgttcatgcaaggatggttgtctaacgttgtagttgcacacctacaaattatagagggcgaagacacgcttacgtgaagttttcgcagcttccaagcaaacgctcgaggaccaagcccgtgatcttctcaggcttcagcaaaaggaagcggacaacgacttccagctccgagttgccggcgaaaaaggtttggcgcggtggcgacagttcagctcttgcttatcagattctgatagctctttctgttaaactatagctgcagcaggtgcaacaatcctgtcgaaagcgaaacgtgagttgtcagcagctaaacacgcgttgctggatttgagagctctcgtcgatgagtaagttcggcttttgacccgtagcatgccggcggagggctcacaataaggctatcgctttgcagccaaatatcggaaaaggaaaagtggcagcgatactgctgggaactggaggagcgactgcacgaagcgtcgaacgcaagctacgtcaaagaggtgtgttggttggtcattccacattgagagggctctgcttacaccttcttgctgatgtcgattttgtagcgtgatctctggcgaacaaaggacgcaaaaaaggaggagagtcggaagaacatgctcttatacatcgaggcacagaagggcaagcgccattttcggcgccccgtcgagcctacagaagctgcgagtttgacaagcagggcgagttatgttctgagcttcgagtctgaagtgtccgagcccatagcggacaacaacgacagccgcatcgaatcgacttagctcacgatggctatcgatgcgtttcatagcacgatgctactcttgtagcattatccctgataactactgctgaatacccttcagacctcacgcttcatattgtatcagccattcattgaactcgagcagctattactacgtaagttatttgctcccctcatccagtgtttgttagtgtcaccgccctcctacgcagggagagtatgagaggcgggctctaatgcactccggatatcgtctaatcctcgggggcgccgtcgattcacttcggggccatcagctcctccgcgaacaggcaaaaaaaagtaaaatagtaaccctagtggacccttgtgtaacccgactattacgtgaggttaccctcacttcaacttgaagacgacttcccagtgtgaagttcccacacgcactcagcgcggagttggcataccccccccccccccccacacacacacaaagccaacagagcaaaatattttcgcgcatgtgtatttcactgatggagaactgataaccgcacgtaagcctagtaacacaccggagaagctgcaagaatcacactgtcatctacgcgtggccttgctggagtgtcgtgcatggagggtggctccaatcagatacccttgttgtaaatgaactggcggataggttgtccgttgcggtccacacgggatcggaactcctcctcgacgctgtctgccgaaatacttcccatttgcgggaacagtgcgacagcgctgggcatggcgccccacaggcataacgtcagcacaactacgtaaatggaagtcatgcaaaacatcgcacagtaggaaatcagtcaggtttgtccaggcatttcgtgaaacacagggacaatgaacgcaccaagctcagcagcaagcttggggtatttctgcttgggcataatgttggtcttcttcatgatctcgtacaggtacggcggaagcagcagggctgtcaaagtgtcaatagcgagttagtcagcaactagcggtgcgagagatcgattccaactacgtaggacgtactgggcatgggcaacgcaacgcgcgtcagcgccacctgtccgagcgactggcgtcccgcagcaacggagcgtccgtggacatctccgtgctcgtccatgatgtcaatgccttccctgtaaacggcaatcaggattgagtgagtcttaacagcagcttccaacacgatgagatcgatagatcaacgtacgtgaactcgttgaaacgcatggacactgcgttgaatgcaccagcaccggcgacggcaacaaaaggcaccatctatcgaaggcaaacgagtaaaaaatattagcaatctcggcaaaaacagcatcataaaatgtttcgagcagtggctactaacctttcccaggaacagacgcgtaccgggagaaatgcgcttagccttctcaaccatcttgccgaggccgacggccatcgagcaagaaacggccgtcgcggttgcatacgactctgtagaccaatacaagtatgtcttgttgaggaaaacaaacaggaagaaaaggaggaacagcgctattgacgtactcaggatggtcgagttgtcctgctcactgctggcattgcggttggcgtagttaaagccagcgttgtagctctggttcacccactgccagaagatggtgtttcccagctgctcacacacaacaggttaggtaaatcgtcgtggccagcgcaacacaagcatacaaataccgtaccgtgggggcagccagcagcatgccgacgcaaatgggaatgttcaccggcatgaacgccgacaagcggaatgctgccggaacggtctcgccggtctgggggtgcaccgcggcctcataagctgagcgtacgcgttacaacaatcgtaacagcaaagtcagcgccctaaaccccaatgcacagccaacatgcttgcgccttaccttgacggaggtcccagagctcagcgtccttgaactggccaggcgggagcgttccgttgcggaagctgtccagcgtctccgtcgcgtgcttaatgtcctccgagctcaggaagagccacctgaaatacgcgcagagcgtgagctatcgattctcgcgctgatcaaaagagaaccgaggacaaatgaacgtactttggggacacgagctcggagaacttacgccaccgaccgacgtacgtcgaggtgtcgtagcgcggcttgtctgggcaacatatgtgcattcgcagccaggttaatacgtgctattcgctatgttatccgagtccagcagattccttcatgcaatgtcttcttaccgagcgagaacggaggcacttggtcggtggacatgttgatctagatgaatgctgtacgctggctggcacttgttgcagttgctgcgagttctcaagtgtgtgcaccaccagcgaccacttggttggtcgcgacgctttatcccgtatcaagtccggcggcccaactgagccacgtcagtggcagggatgctttgcgccaccgaacagctgcttcgatacggttcatttaactttctgtaccgacaagtgtgccaccactggcacccgcggcggcagcgatcagcaagaaatccgcgcactgaggagtctaacaatgcacacaatcacgagcttcaattgctgttgctttccttcccaagacaccttttgacgatcaagagggttggtgctgtacgatcgccataatcagagttaacttgtggcactagccacttttcagagcgcttcattcatgatgattaccgcggaaacggacaagttcaagttcaagggctggcaactcgggctggcaagctcagttggcaaaacctcacagcgcgcgcagcaccgcagttagtggacggttcaagcgtcgagtgggcaggcgcacgtattagattgggcggtgtaaatcgtatagctagcatggtgtgggagcacggagtattgacggcatggcggatacaatacagtggcagcacaggcccttgttggagtgagctcgcattgtgcaggactgcgctaaccctaacaaaatcgcaaggtgatgcctctggcaaccggcaccacagtcagcagctccaaatcgagattgcaacgcttgcatgggacattggtgcggtatcgttttttttaactgtgtcgaaacgggaactagtgtcggcacttccgactcgaagttgagctttcacgttccgcatgcaagttcccatccgctgatcaaattgaatttgttgcggctatgatactacgagtaagtagatgaaatcgcatgctcctgtagcttcgcctgctgggcacttcgttggtcgctttgaagtgtcattgctgtttggtatgctcgctcctgaactcgtacgatccatggagcttggggacaacctgcaagtggaccttatgcatccctccgatgttttgcagcactgtggaggaaaaggcggaacctaacaatacttgcgttagcgaacacggtacagtagttgaacacctctgtcgaaactgcagtattgtaccagccgatgtcaagtaggaagcagcgcggtagtagctgcttcatcaacgcgcagcgaaggcccgattgtgttccaacttggaactttcaagtgaacagcttcggtgtgctgggctacagcatcgttaccgatgttctatcatagtcagtgatcttcttcgtaagcgtgcgaaaacgaccaaaagtacccgacgaagaaggcgaaggagctccacacgcttcgcattatgcacctcgacggcgccaaaccggcagagcttatcgccccgtgaaagcgtactgaagtagatcatacgcaccctctactccgatgcccgctgttcagtactgtacaaccattcaagatcggatacgggctacatcatgcaaattcgatggccaatcaagacgcgagctgactaaaacttcaacttcagtcctgaagtggacgtggcaaacgcgatgcacgcgctgatatcgagaacagcactctcatgcaaagaaatgcatgcatgtacggcatgcattcaccgcagtgaaggcacacagacgacaaacaaacacgttcttgtggcagtgattggttggccgccacttctcgggatgtcaaacaacggttttgtacttttgcaagccctcgcattcagctacgagacagggcagtcaagaccgacgcaagaccggaatggtgcgttgattggcgcgatgacctccttcgggtacgctcgcgctcgtcgcaggtagatccctcggtcgctggcgcagcgataatagcatgctagcgcctgggagagcgctcacttttaaatctgctcgctaccgcgctcatctcctgctgcttgcctacttcccaccacaccacacacacaagaaacatgacgagcgtccagcaacagcaacaaccccaagaacctctggcctccaaggtggtcgtgggaagcctcgctcgacttgctcccgtcgacctgatgcccgagcggtactcgcgtcacatgaagatcctgaccaagctcaagcagatccgccgggtgcaagtttgtcggagtgagaacaacactcgaagctatgtcatcgacgtgtacaccaactcgcagtccacgacccgcatccctacaactttgaagactgccgcctctgcggtggtcctggagcaaggacaccagtctaccgcactcttcaaccaagcggacgtccacgtcgggaagcagttctccgactttgtcgcactgcgcgacgagctctacgagttctgccacacgggacctcacctgtacatgaactgcaagttctgcagcgaagtgacacgctacctgctctttggagcggtgctaccgggcgcactgctgacctggatgcttccacagcggcagcgaaccaaggcggtgcagcgcttcatcgagtccttgctgcaactggcagtctcgtgcccagtgatcgactcgcaagcctgcccctgccaagagaagctccctcgacaactctacaagttcctcttcgagacatcagcttgaaggtctttaactcccttcgcctcatcctagaacgtatctaaacctacttaccaaagagcggacacttcatccgagctctaaacattgaataatatacctctatctattatttttaacctttacggtcatcgcctgtatgagctttggtatttgccgtaagcttatgcctaggactccaagccggtataacatctatttggactccaagcaacaaagctcttcaactctcccaggtagaacggaaagagtcccgcctaggattgcttctcgtgtcatctccatcctgacccgcgccgagcgaagcgcccacggagatgacgtccatggtctctagtgacgggcacgaagaagtggcgaatagcgctttggattccccccccccagtcactgacgttgtttcgcacatgaataataagttcttgactacatactgttttatgatatcccatcagccaatcatcagaatctttagacggggaaaaacacacacttgaaacggggggctatcaagtgaccaactgactcaatagctcgcgatcatggcgtccaggaacctcctccgccgctccgcgcgtctcgccgctgctgtcggaagcaagcgcagcgctgtgtgcgccgtctccacgtcggtggctggccgtcagtgcttccaggcggcacccgctgcggctcagatccgtctcctgaccacgcagtcgactgccagcagcgaagaaacgacgaggccggagtcttccatcgacccggagcagcgcatcttggagaaggcaatgaaccacgtcgccgtgcatgggtgcgtcgctttccggcctccaaattcgctctacaagctgagatatcctcaaatttaacgttgcgggatgttatctcattgtttgttgtgctcaatagatggaccattgaggctctggctgctggcgctacggacctcggctacccgtcggtggcccacggcatgttcccgcgtggagccattgagctggtggagtacttcatggactcatgcctcatcaagctgcgcgagacgctcattgtcaacacggagcagctgcaggccatgacggtggccgagcgcctcaagttcggtgttcgcacgcgcctccagatgattgaaccggtgatggcgacgtggccgcagggtatggcggcgggtgcgttgccgcagaacgcccccgggacggcgaagagactggcaaagatctcggacgagatctggtacttcgctggcgacaagtccacggacatgtcctggtacaccaagcgtgctattctcacgggtatctacgccagcacggaactgttcatgctcagcgacaagtcgcccaacttccaggacacttgggcgttcctggaccgccgtgtcgatgagaccattcaattgggcgaagtgccgcagaacgtgagtgttttggatgccgttagtgttgaaggtggatgaactaacgagctgcttatctttgattcgcttgcatcacagttgaatgacgtggctggcatggccagcattgggctgcagtcggtgttctcggccgtgacgtcgcttgcgggccctctggcaggacagattatctcgaattcgcctctcagccatgtccccaacccgatttctgccgtgggaagcgtggtcccgccttcggtcgtctcggctgttgcgtcgggaatgcccttcagcggccccacgcccgcggctggtgcaacgggtggtgatgccatggcgttcgagtcgaaggacctgaaggaaattaacgatgaactcgagaaactcggcggcgttgacacgactgagcgacggagctaagccaccaggaccgtgcggtatcaagcgatttcgagctgccagccgtcatggatatagtgaagacgcgtgaacacttctcgccgacccagtacggcatgcctccacaggcatgcccacatacaaatcaaagcaacaaccaatgcaaggtatttcatgaactgaaatgctcgttaattttcaaacattcgccacggcgttcaagttgtgtcttcctcttcgttaggctcgtcgtcctcttcctctccgacatcgtcatcatccgcttcctcgccatcaccaccttcgtcttcactggcatcctcatcctcatcgtcatcatcatcgtcgtcgctgccgtggttgttgctgccctccgcctcacgctgaacttgctccataaaagccttcttggctgcaatctgagcctcacgcttctcgcggcgggcgcgcttcaagttgtcaatgcgttctgcctcctcacgctccatgcgggcttcttcggcatcccagaacgcgtactgcaggtctagcgcgcgcaggtcgtcacgcacccgcaacagcttccggtaccagagttcctgtgtccagctagcctcagcgtgctctcgcttcacgagacgtatggcctcgccaagtagcaacggcggccagtccttgcgaaagacttcgcgtttgtcggggcaaaacagtcgccccttgccataaatgcgattgcagcgccacgttccagtgtacgagtatccaagagcgctcgtctccgttccctcgccgtgacgcatgttgttgtagaattcaccttcatacacagctccactctggtgcatctgcagcttgccgaccccgcaacgctggcctcgaacaaactccccttcgtagcggaacccacgctccatctccatcacaccaaagccatggaacttgccgtctgcaaacgcaccagtgtacttgacaccgttcgggtacaccaccgttccattcccgcttggtacgttgtgggcaaacccgccgcgatacttgccgccatcagcgaacgagtaaactccaagagcgccatgcatttctccatctttccagcgcccgttgtacgtgtaaaacgtgtgcttgccgtgagattcgagctgacctcgaacctgtggcgccaaacctggtggagcgttgaccattgccacctccggaatgatttcaagtttgtcgacctcgtcctcttggttgtcgcttgtttcagggtttttgggcttcggaggaggctttttcaccccggtgatcgccgcctgctgctgccgcctgcgagcaatgtcctcatcaacgtgaaaagagcagtctcgaaatgcccgttgaagcagaatttggctcttttggcgcggctcgagggctttcgatgggtctggcgccgccagatccttcggtgggggcttcatgatggcatcatagtgcttttggtgcgcgagcatgcggatttcgacagtggagagttgatccggtactgcgaagaaggcctgctcgagccggttaaacagcacggcgctccagcggttgagttggatctggttcgacttgaggaaccatggtgcgaagcgagcatgcacttccggcagacccacgcgacgcagcatgcggtagtagaagacgctgcgcgggtcttcatccttgactctctgttcgcagctcaaaacgtcatgagctcaaagctgtcctgaagtttcaatccatgactgtcaacgtacgcgctggtaggccaccaagctcttgcggtctttcaagatgagtgcgttgatctgcttcacaagctgcagaatcacaatacagagagctccctggtgtgagaatgctatgtgattcgcctgaactttacaatgccgtacacacgtacgttgtgcatctcgcgctcaacgcgcttcttgtcctcgagctctcgacgcaggatttcacggaggtatcgctgccgagcctcctcgggggtctctttccgcggcttcctccgcccaggccataagctccgcactgtcagcgacattgctgcatgcagaagcaaccttggtgcactggggttgctggcacgtccatgggcgacgctttgcctctactaaatctatagcgtgtaacgaacctgtgctcatgcgtgcaatgttgcaacgcgtacgctagatgtagctacgccgtgcgggctaatgctaatgccaacagtgaatagaagtaatgtgcatgaaaattgaagatgtcgaaaggttctatagtcacatgcacatgggacccccgaggaggaacgtgcttgcaacctcaaacaccttacggttggtatggcaatgctatgttttatgagcggcttcacgtccacggaggaggggaccgaacaccgagcgagcttgcggggcaataaattgacgaggggttggatagttctctcagtggtgtttgaatacatttttgcttccacatccgacaggtgaagcccgaaggcgaccccggctttcagtattagcatggaaattttttacatcaacgagaacggtgcgaatggggccaacacacagtagagcacttgtgctctatgcgatagaaaggaggaatgacccggtcgaaccgcagggatcgtcgtccgtcggttcgcgcgcgttcgatttgactggaccagcttcgcccaaggtttaccttgggttgagtatgaccatggtgaaccaatcagaacgagttctaggatggacccaggaacctttcctggaaagggcaggatggtcctcaggcgtcccactcagagcgccggaattgtcgatccagttgattgacgtcactcggcgcgaaagggatcacgtgggctgcgacttagggaaggcccgagtgcgcttgaaaactcgctgtgcttgaaaactcgctgtgtgcatgcagcggagagtggacgggtgcggtaaatgtacctcgacaacccagccagtgggttgaatcaaaggcgcagttcaccttcccacatccatcctccccaaaaggaggaacagtccccattctagaacagcgccgacgggcgctgcagcgcccgatccttggcgaggcccccgagctggcgacaggaatgtctacggatgcgctagtggcgatcggcaggcatcattcggcccgcagagagagagagaggtggccggccacctcagcatgcgcgccaatctgcagcagaatccttgtgcgccttgccagcctgcagcagcgggcctgaaaatcctgcgcgtcctgtaggacacccgcccacctagaagcatagcaggcgatgcgtgacagttgcttctacgctggctctcgggcgagttgatcgcgcactcgtagggtttatttggcctcggtcgagccgctatactgcggctcgcccaatttccagtttgtgctcggcaacaactcggtaaaaggtggctagacagcacttagatctcgtgaaactggcgggcgttaagcgaagctgtttatgtggtcgaatagttactggtcgttatagggctgctgcagcactagcctacaaaagtcagtacccctttgcagttttccagcgtacccaattgaaggtggccgcacgcatggatcgccataatttcgtggttattttcggagacccgaccagctgaactcggtggtcggcgcttattttcgggtgccgaccacatgttttcaaagaaaactcggtagtcggggccggccacagttaaattaagcgtacttgacttttgtatgagccttaggagatatgtggaacgccttaggagatatggagcgccttaggagatgtgtggagcggtacatctgttaattctatcgagctagctattaactgtccggtgttaacttgggagacaccctggtggacaccagtgtcccctgaaggacacaagtgtctacctaaattaattgtcaattgtgatttagtttcgtacgaattaaatggtttaaattgatttcagtcatttatttatttgttttaccctgaggggtcgcgggagaaagaatccggacgcgaacgaaaaacgcgacgagacacgagagctgccggacgttcgtcatgccgtttccgcgcgagagcatgcgcgccagttccctggcagtcgggtgccagccccgcatgcccctcaaggaaatgcccctgccccccgacttgcaagcgctgctgaacagctttcgccccgagctcaccccgccgagccccccgccattgcatacggtggtcccggctggccttcaacctcaagattggttcatcaacggggcgcacaggcagttcctgcgcgccatgagcgagccgatccggcaaccggcgcagaagccccagccgttccccctcagcacggttgctccgagcgcgccgctgcctaccatgcctcctccgctactgccaccgccgaaggatgtacctgtgctgccatttatcccgcttagggtctccagggctctgcgtgcgggttaccgtggaccttacgacggcaggatgcagacgctcaagatgaagacgctcgaagagcgcgaacgtgtgatgctgtcttttctccgcagaagaagtgcaacagggccaaccctcccacaaagggccaattcaagagcgccggcaaatgcggcgaggtggacgcgaagaccgcggagaagtggtggaataaccgcacgaagcccgtgctgccccaaaggggccgccctccaaagaacttctctccaccctccacgtacacgccaggaataaaggaaagcatccacacgatccgctcggccgatcgtgaggtctttgcgtcgacattcatcatcacctccaaggaatatgagcaggctttggaagaccaggctgcagctggcgagcgggtgttcttccagaccgacaaggcacaggccggaccaaaaggccagtcagaccccgaggcgatccaccggatggatgacgctgatgtgcaagtcaagctgatccccccctcgatgcacgagaagtttgtgtaagtacaagtatgcttttggctcttatttggatgatctttaactttttttgctctagaatgggagatgctaacagcgcacaacccgggaaaaaacaaatggtgttgggctcgcgtctgtcaggggtattggcacgatcgcgcatccaaagccaaggaacaaggaagcgaacgtgtatttgaccgggaaccagatcgacatgtgtaaggctcgggtacggttttcacggagttgtcggattgagatgtttaactttctccattgctagccccgtacatggccaagttcgcagacgaattcacgaaggggaagaggattgatgagagcgacaagatcatggctcgaggcgcgaagagacaaaagacgacgggcgccttttttcttgggagcagctgagctggagatggcactgtttaaggtgtgagtggccacaaggtgtgagtggccacaaggtgtgagtggccacaaggtgtgagtggccacaaggtgtgagtggccatgtacgatgtagtaagactccaacgctgagtaaaaccccaacaatgtacacaaaatgctcgcttgccgcctccactcgttgactcgtcgactccaacgccacgcaagacgctccaagttagggttgcacctgtcaacgggtcggtgcaggtgctcatcgagcacgcccgggtttgcgtgcgcgcctgattatgctggccgctattctcgcgagtggtgtgccaacccaggcctgctcgtcttatcagctcctcggggacaacttcaatgcgcgcggttattaattgccgattgaagttgttatgctgcgacgccgaccggatcgacgcgccgagctcgctgtgctgacgccgcgccgcgccgccgaaccgatggccctgagcctcatttcaagtgcaagtttctggcaattacaaattttagggctatggatattgcgcgtgaaagtcgaggcgcgccctcatgttagcaacagctccgctgaccgcacacgccccagctgggccgccacgcttcagcccagaccaacgccgcgccgcgagccgcacggggctggccgattccaggccgaaaaaatgtgcgaaactgaacgcgctgagctccaagctagcgtttccctcgctcggcgcctcaagcaaggccaggaaggccttccggcgatcaggtcgagccaggtggttatggaatgcgcgcatacaggggcccagtgcgggcgcgtccgttcgtgattggccgcgaggcgacttgcggctggctctcgtcgccccggctgtgcgccctcgcgcgagcgcaaaaatatcgccggcctcattcacaaagtggaaacccagcgagcaagtggcagcgcccttcctcgccgtacgtagccctagccttcctccgcccgcatctggtggcgtgtagacgcgcccgcccgcccgccgacacccccacaccttcctttccgcgccacacccacgccgcctcaaaggcaccccttcggtaagtttcctctgtatgcatgggctgcgacgcgcgcgaaggttgatggcttgaaaagcggagaatacaagcgtttcccacaacccaccatcaccttctgctcactgcaccaccccacactcactctgtaaaggaccagctactaatgaagtgccgccattctcccttgtcttgcgcagcagccaccagcagtacgtcgtcggccgagatccgaccgaccccgccagcaaccatccgcttccccaagctctcgatgggctgccagacgtccaaggacgttttgccggccagccccagtgagcagcagcaccccagcctcagccagatcttcctgcaggccgcctccaagcagcaggcgcgcgacgagagcggcgtgggcgcgcaccgcccgcccaccagcgactcgcaccgcgacgtcttcagcatcttcggcgagcgcggcatggtgctcgaggccgccgaggcgcgctcaccctccgccagcgactgctcgcccgccagcccgagcggcagcgtcttctccaccgccaccaccgcctcggacaccgagcgcacactggtgctgcaccgacctgcaggccagtacttcccgcaactccgagtgagttacggcgtctactccgacacggggattcgcaaaagcaacgaggacagacagaccagcatctcgcgcaccgtcgacgacgagctcgtcgccttcttcggactctacgacggccacggaggccccgaggtcgccgagtacttggccgccaacctccacgagaacgtgttcacgcacctgcgcaagcccacgaacgagccggagtctgcacggagcctgcagtcgcccgacctggagctaacagacgccgtccggacagcctacgcagcgacagatgaggagatcttcaagcagcagttgcccagcgggtccaccgccgtgtcggtcgtggtccggcgctccaccgcgctggtgtcttctgtaggcgactcgcaggttgtattgtcctcgaacggccaggccaaggacatgtgcatcgcccacacacccgacctcaccagcgaacgggagcggatcctcgcagcaaagggacagatctccaagggccggatctacggcatgctcggcgtgtcgcgggcgtttggagacatcgacttcaagaccgcgcgcggtgagttcaagagcaggttcaatggagatctggtcagcgccacacccgacctggtaatccacgagattaagagccaggacgagttcatggtgcttggctgcgatggcctatatgacgtgatggagccccaggacgtggtcaacttcgtacgcgccaagctgggcctccacggagacgtgcagcacgcggcggaggagctcgtgagccacgccatcgcgctcgggtccaccgacaacgtcagcgccatcatcgtatgcttcaaccaggacgagcaggaggttgtgcctgtgacgcccatcgaggcagcgcaggcggccgaagctcagaagaagcgcgcggccgccgccacggtgaactcagtgtgagtcgtctacttctaccttctaccaatgatccaaggctaagcgaagtcccagccgcaggcagcagcctacacatgtaccatagaaagaagacaacgctgctgctggcgacaccccgtgtaccattagttagtttatcccccagcccacgaagctcccgagcgagcgactgggccccatatttactattaacaagctcctgtttgacagttccatccatcgcatcgaaatgcgtcgttgtctttgacactttgacacgagcaggtgaagcagcaaaacttttgctgaacctgcggcgaccactagtttttggcagctcattccctagagacatttgcttcgccgccctcgcgccgaatatcgtttcggcagcgtctcgtcttctatctggagattgactggacagcgcagcgcggctcatgccatcgcgtcggtgtgctttgagattggacatgttgaccatcgcgtgacgaaagcgtatgtgcgattgtatggagttcacgacaaattttgcgtcacctgcgtcgccacgtaccgcggtctggtaaaatatagttcaacacgactgcgaagttgtccctcgttctgctaaaaacaaatgttcaacatggcacgcgtcctccgtagccaactacacctctatcaacacatcaggacgcagaattattgtcgtgtgtgctggcgtgctcgccgctctcggtcttgacctccttggcggcctgcatgacggcggcctcttctccctcttcacgtcgacgcttgcgttcttgcgcaatgcgcttccgttcatcgacggagtggcccgtgtcgcgcttggccaacggcagcgtcttcttcttcttggacagcgggagcagaggactcacgtccttccactgcacgacgtcaccgccttcgtcggtcagcagcttgcgctcgcgcatcagctgttccagcttgggcgcgtagtgatccaagtccttcaccaccaaagctgcctcgacgcggaaagcctctagcgcgtcgaggtggctacgcagcatcgctgcctgcacagaacgcttctcccacatctccgtgagctgagcgtgaacctgcagcaacgcgagcggcgtgttctcgaagcgtgggccggacccctctgcatcgtctgggtcagcgaagtagcagtcgtgcaggacaagcggcaagtcggacgccatgtcgtactgcggcttgcgtggcgtctgcgcaatgtccagcagcctcggaatgatgctgggctcctcctggcccgagccgatcaaaaacagcacctcgaccatgcagcgcacttggtgccacaggaacgcacgaccgaagacttcgcagcggaacatttgctggctggggtcatcagcacgctgacccgggcactcgacgatctcgaaagagcgcacgttgcgctcgtacacgtggcagttggggtcaatacggcagaagttgcggaagtcgtgcttgcccaccaggaactgcgcggcagtgcgcatcttctcaatgtccaggtcgcggcgcacgaaaaagtaacggtacatacgggccttgcagtcgaagcgagcgctgaactccggtcggcaggaagccaccgagtacacgcgaatgtcggcgggcagcgcgcggttgatatgcgaagcgtagtcgacctccgtcagcgtcttgatctctccagactccaaccgcacttggaacttgtcgccaggccgcacatcgtcgatcgatggcgcgctgagcagctcggcggtagctggcaagttcgagcgaatgcggagcgccacaacctgtccaaaagcgctgacgccgcggtccgtccggccacaacgcgagtagccagcatcgtccacattctcaatcaacttggagcgaaccagcgcctccagcagatagcgctccaccgtctcgggcatgtggtcctggcgcgcgaaaccggcgtacttttctccgaggtacaagaacttgaccgccaccgcacgcatcgtgtagttgctcatgttaaactcacgcttcttctttttcttctgcggctggttgggtcctgccgggttgttggcgttctccgccatcttctgctgcttcagaagctgcttctccttcttcgtcttcttcctcacgtcggcgggcgtgacctgccccagcttctccaccggcacgcgcatcaccttggcaatagcattgttcacaacctctagcaacagcaaattgcaacgcaacacaagttagtgacgagtgtatcacccctaaaactgagctggccaaggttcacatactcgggccaaccgagttgcggagctcgtgcaaaatcgccaaaagttgatccggcgtggcgttgctggtggtcagtgtgctcaggtccctgggcggcgaggcaggcgccgacgcactcgactcggtcgcgctcatcctttccgctgccttgtgcctctaaaacgttgtttgaggcgaaaaacggccattgcagtttagccgtagccaatcactctcgaacctcaaaatgtagccatctgtgctagtcaagtccttcggccatcatgctcgcgtccagataaacgttggggtgcatcacgatatccgcgtcaagatgtcgtcgaccaggcgatattgaagtatcttgatggcttgagtgtgctgtcttgtacgtgaatccggcagggtgtgttgcattgaaaaaagcccggcaagcgctctgacaatggccactggaggcttgttgcgtgatttccattgccgtttgcagcgataacccgtgacgacgcagctcctgttgtaacgcgggacgtccccaatgcttgaacggacagccgtggtattgtccgttgcttggcgcgccgccaccaattatctgctcgcagtccagcggctcatagtcctttcgggatccttcgagtccgtagctgtgacggatgtggtaggtgtactccttgtcgaacttggcggctggaatcgtcttgatgaattccttgcggaagaattggatgcactcgtgcacggaaaaccccgcgcctttgaggaacattcggtactgcacacgtccgtcgtacttgaggtggtggttctcacgcagcttgcggtgcagttgcttcatgcacaacggaaagtgtttttgagctacactgtccatcttcgccacttccagcttcggtctgccagagttcttcgtgattgaatttgcagatccggccaacgtacgcgcctccactacgaatccgtctagaatcggagccaaccgctccagctcatggccctgcgcgggtatagcgcactgcaagtctcgtatttgctcctctaagcagcgtctgaaatggtacactgctacagaacccattcttcgaaggggtaccaagcaaaacccgtcgcgaacaattacgtcgcgatgcttcaccaaagcaggagcttccatgaagggcacgcgatagattccttgctgcgttacgtcgatctccgagtcatctgcattcagcagctcatacctgatcctttcacttgaaagtactgcaacagccgtgtacggtggctggcacctaagacgggcagcgaagagcctggattccgcagtgaccagccaatcccatccgctcgacactctgtgcgcttgcacacgcaaacaagaggttattacaatgcgttaagctggtagagtaaatgcagcactttggtattacctgcagaacgccaagcgcagtgcgtagtgcgacagttggtcggcgttggtgtcgtccccaacttcgagcgccttttgggtttgcggatcaaccgtcgactgctgcgcgctccatcgtgcactgacttgacttagcagctttacgcgcctgtgtccgagctcctcgaagtcatctaaggccacgcgttgctgcggagcgcggcggtagaagctcagcggtgccgtcatgttgccttgtttgactgtgagcgtcggcggttgaattgtatattttaggcaaatccaaatgttagggtaagtttgtgagagcacagcaacagtaatttttcagataccggtacatgaatattgcaactatgctgttttcaattgaggctgaatccctgtttcgtgtcagctcgactcgagctgctgaagacgcgttccggggtttctcgccagctctgtcgaggccgctgatctgggttgagaaatatcggtccggtgctggcggtgaagcttccgatggcttcaaacctgttggttgcttgcaagtctaggttgctggtacagcactcctcgaatgctgaaggtgcttgggtgtccgacggcagtgcactgctacggtttcgtaaacgtgaagacactggtgccgactggctgtgtgggctttggcgtgaagctcaccgcaagaggcggtattgagccagctcggcgctttgttgggcggcgctatcgcactcccaaatcggttccaggtgcttctggttctgacggttgacgtgctggagctgacggaccatttgctggcgcatcacgtagccctgaacaacctcgtaccagatgcccgcctgctgctcggaggcgggcgacacgtacatcgagcgaccgctgctgagcttcagctccaagccgaactccgcgccggaccagtagaacacgtcgacaacgaggtcggtgcctagtaccttggaggtctcacgctggtccttgcggtaggacaggtacccgtcacggaagacgaagtagcggcgcttccagttcttgacgcgcgcgccctgtttcacgagataaccttcggcgtagttgttaagcgccagaacctggtcatcctcatcggcttgcttgtagcggtggtggttcctcattatgcgcggttggtagctgggttaatgtactgcagtggctgcagtgagattggtggtcaaaaccaaagtgagggttgctcgatgcgtcgatcgaacaaagcagagctccccaccattacgccgataagaccaatcgtttacgtatgattcaggccagtgaacgagcttcatcgaaaaaaaactcctgtgctgtgtaccgatcccagctgggtgaaacgagggtacggggtgatgtacaactttgctcgagaacgttcaagtggcagttcaaggtggagagcgtgaggcaacgctgggagctgtgctcagtccacgaacaaggcgatccggtcgtgaggaccccacccacgccgtctacgagccatgagctttgcaacggggcctgcagtgtgtattgtgctgtggggtgtagtggggcggtgttgagacgtgccagcgtatgcccaaccgctgttccgccgtgcaagcagaactgtcaccgatttctgctgccctgccggcttgatgtttacgagggtcccagccagcttgaaatcctgcttccgtctgcctccaggcgatacatgtatttctcatgcggtagagcgcaacttctacacgtggtgcataccaaagcagtaaacttcggtaggtctctctgcgcgtgataagcctgcattgagctgcgctaatgaaacgctgtcgtcgtgctgaatgctatgtggtgacgctagggatcccggcgatatgcctccattacaatgttgcgcacagagaccatcactagcattagtcgccgaacgtcttctacagcaaaattttgtcctctcttattgatgaaggacttcaaatctcaagtttttttcgagtgtgtcagtacgttgaatctgaaatcgttcggattatccgaatcggatagctttttatgatccatttttttcgatccacaacaaccgtcaacttgcggtattccgccctcctgaaacacagcgaggactcaaccgcatcgctgtcgatacggttttatctccacacctgatgccatgttgcggcgactccagctcgccgatactgcaggtggatgaatgcctccgacaacgatagctagatgcagggttgccgcaattgtccactccaaacaatagcctcccttcaccacaggggccatggcaattatgctaaccagtagcccatttgcaatacaggcatagcagcccctgagtaatacttggtcttggaagactcggaagcaaagcctcatgtgatgcgattcgactggcaaattgtaggttactgagccggtatgcaataccgtcagtaccggttacaagggaacagtatccagacctttgtacagacctaaattctatccaaattaggaactagagcggattctagatctgtagcttttgatttataagaaagtacacgtgtacccgttttatatcggtataccggtatgaggacactacagtttctgtgacagttcaacctgctcatcatttcgaaagaagcttccaagctctcggacctggaaaatctcaacccagcgatgtccaagaagcccgagccgagctccgtgcgcgtgcggttggccacctacgcgggctcctggtactcgcacgacgagcacgagctcgagggcgagctcgcaggtgcgtggagccgatcgcccagcaacttttaggcgcctgccactcaactgcgctgtgccggggggcgatttgctctgctactaggctggctggacgctgcggaggacaatgacacgcaggagaagcagccgagcattcgcgccatcattggaccgcacgcaggcttccggtgcgttgcagtgcaggggagaggagagggaagaagacgctgacgctgacgttggtgttgatgttggctcttgtggcagatactcgggccccacggcggcgtacgcgtaccaccatctgctcaacttggaccgcatcaagcgcgtcttcatcctggggccatcgcaccacttctatctgcggtaaggtgttactgggggtgggctggagcttgatgggtgagctgacgactgcgaggcttggtatgtgtgcactttagtgggtgcgccgtgtcgactgctcacgagtatgagacgccgctgggcaacattgtgatcgaccatgaagtcaacgagaagctcgtggattcggtaggtttgaggtctgttggaagcgggaattgcgtttattatgctgacgatttttatgctgcttttggcgatgcagggcaagttcgcgaccatgtcgatggacgttgacgaggacgagcacagcatcgagatgcaccttcctttcatctacaaggtgggaattcttgattcagttgggcttggtaagtgtgtactttggtgctgatcggttgcctttgcaggtgatgaatggccgcaagttcacggcggtcccgatcttggtcggcaacaccaagagcaaaatggacgaggaatacgggaagtacgtgatcgatatagcccggtattgcatccgaatattggctaacgtgccttgtggttgcaggattttggccccgtacctggagaatgatgagaatctgttcgtgatcagctccgatttttgccactggggacctcggtaagagcgccaattcgttgttggggtaacgttgctatggtcattaacggtctcgcttgatttactccttcagattccgctaccagccgcatgattcgacctatggcgagatccacgaatacatcaaatatttagatcaccagggcatgggcgtacgtgactcaagcactatttgtttcgcttcacaacgatcctgacatttgcgttgttttgaaaaacagttcatcgagcgcttggacgccgagggattcacgaggtacctggaagaaacaaacaacacgatttgcggtcgtcacccgatctcgctgctcctgcacagcatcttggcctcgaagaagctcaagtgcacgctcaagttcgtgaaatacgcccagagcagtgcatgcatgcgccacggcgactcctccgtgagctacgcttcggccatcgtctacagcgagccgtaactcgtaccaaagctgcgagtatggagtaacttgcagcagccttcatgttctaggtaattgcatcctacgtaaggtacagtatatcgatggtttctctgacttggattgctgtagaagatggaattgtatgactgtttatctttcatggtgaacattggacgtctactagcgcttttgcagcgtcttacacagcctagcgcctacttctgcggtccaaacgcttcattcagcaccacttctagctgctgctgcgagttcttggacaaaccgacggcaggagcggccagactctcgcggccaatgtactcgaggtgctgcttcttacccagaagcttctcgatgtgagcctgagcgtacgtccaagcaccctggttcagtggctcttcctggacccagacaaacttcttggcgttctcgaacttggccagctcgtccgcgacctgctcgaacgggaacggagccaattcttccacacgaaccagcgcgatgctctcggggttcttgcaacgagcgaggcgctcctttgcgagctcgtagtagaacttacccgagcagaagtagaccttcttgacctgcgaggcgtccgtgattgtagggtccgaaagcaccggctggaaggttgtgcccggccccatgtcggacagcggcgacgttgcgtcggcaaggcgcagcagcattttcggccccatgatgatcaccggcttgcggaatgtgcgctgttgctgacgacgcagcaaatggaagaagttggcgggcgtggtcacgttcaccacgatcatgttggtgtcgtgctggaactgcttccacacgggctctgtctccgaatccttcaacgaggagcgcggagtgagtgctggcgtgtcaacgagctgcaagaagcgctccactcgaccgctcgagtgatcaggaccagctccgtcgttaccatgaggcaacaacagcatcaaaccagactgacgcatccacttggactcggcactggacaagaactggtcgatcacgatctgcgcgccgttgaagaagtcgccgaactgtgcctcccagatcaccaggttgtcggggctctccaccgagtagccgtactcgtagcccataacagcaagctccgacaggttgctgttgacaacgctgagcttgcccaacgtatccgacttcttgggcaagtggtgctgcagcgggaagtagcgctcctctgtctgttggtccgtgaatgaagcgtgtctttggctgaacgtgcctcggcggcagtcctgtcctgccagacgcaccgagtgtccgtcttgcatcaaggttccgaacgccatggcttcagcagtggcccagtcgacgcgaagatcggaagggtcttgtccgtccttcacctgcaacattttctggcgtgccttgatgtgcgtacgctgcagacgaccatggggctgaatgcgctcggggagctctacggatgcgaggccgacgtcgatgaggttgtcaatctcgactccagtcgcgacgttcacgtacaggtcttcaggcttcggctgcgtcatcgtcgaccacttgcccttgaacgcgtcgatctccgtcggcttgtaaccaggctcgccggtgacgatcttgagttcgctttcaaggtggtcattcaggcgctcgacagtcttctcgaagctggtgcgcgaaacaaggccaacactctccagctcatgggcgaacttgatggggaatcgctcagcctggtccacacgctcgtacatcttcggctgcgtgaagcgcggctcgtccacctcgttgtgtccgtgacgacggaacgtgatcaggtcgatgacaatgtccttgtggaactggttgcggtaggtcacagccagacgacacgcgcggatcacgtcggtgatgctctcgccgttgacatgcagcactggagcctcgatgctcttggcgacgtcggaggcgtatctagttgcgcgtccatccgggtacgtggtcgtgtagcccacctggttgttcaccacaatgtgcacggatccacccgtctggaagtcaggcagctgagagagcgccagcgcctccgggacgcatccttgaccagcgaacgccgcgtcgccatgcagcaagagcgccatagcgttcgtgttggcatcgtcgtcgttcttggcacgcaccttgccggcagccaccgcgttgatgatctccaagtgcgatgggttgtgcactagggacacgtgcaccttcttgtccgcgtacttcttgtccacagtcgtggcaatgtgactcgacacatcgtcgatgccgcggaagttgtcggggaactccgagtagccgcgcaccttgtggaagatcttgtgcgccgggtactcgagcgacccgaccagcagtgccaggcgtccacggtgcggcatgccgatcaccacgtccgacacgcccgacgtcgtgcacgcctgtagtatcgtctccacagccggcagcatggactcggctccttcgcccgagtatctcttgaacgacgcgaacttcttggccatgaagctctcgaacacgtcggctcgcagcatgctcgagtacgcattgcgcaggtccgagggcgacacctccttgctgctcagcgtctcagcggcgttggccagccattgcttctcctctgccgacgtcaggtgctcgaactcgaagcccgtcttgccgcagtagacgcggtgcagctcgtcgtagagctgctggccgttggccgcgggcaccgacacgactccggccaggtcggcggcggccagaggacgacccagcagcggcttgaagttgtcggccgcgaggctggcgacagcggcgcgcggctggagctgcagcgggtccaggtcggcctgcaggtggccggattggcggaaggccgtggccatggactgcgccgccagcgcctcgagcgacgcggccgacgagaacggagccttgggcagcagcacggcgccgcgctgcgctggggccacgcagcggcgcgtcaggagaccggggagacgcagcatcgaagtcgtgtgcgggggacctggtagaaggcggaatgatgcactggatcatcaggagctccggtacgttcacctcagcacatcggatctgccagggttgttcgtgaataaccccacatattagcggtgttttattcaagtaatagagttcatacttagtttaatccgtgggttttctttactggagataaagaaccccgctgtgggtggtgatgggaatcccgaaatccaaaccgccgataggatgtccggcgctcgggtatacaaacagcaagataaaactcggacgttgaagcttttggtgggaaagacgggccagcatatgacggtcctggttgaagtgcgtggccacatgacttggcgacgcgctcaatgctttgagttcctcactgcttctctcttgcaagtcgagctcaaagttatagctgagagatattaataatacggttgtaagtagtgtgttcacaaaggcaaaacatacaaaacatttgagatattcgcgttacagtgtgtcaagctgccgtggttcctggtcgtcgtcttggtcttcggcgagtaatgcggcgacttgctcgcgttcattgggatcttggatggcttcgagcagaacccgagctaaattgtgttggtcttcgtcgagcattacctcgataatggacacgtacccgatgggcggtcgaatggctcctgccagggccaccagcgtctcccactgctccgttcgtgctagcactctcaacagcgtccaccagaactgtcgaggggggatgcaatacgcctcggcgcagtcgacagcgagtactagagcctgccgatgtaccgggtgcagcgtcaccagcttctggacggtctccaccaaagaacctccgacgaggagcccagcggggagagacagagtgcgctccatcgatcgctgtgtctcgagcagctcgagcagctcattcgtcatcacctggttgaacgagtccgctgatcgagacgaggacaacttgtgcagctccgttgcacccagtgacagcgtcgatgtgatggagggggaagatgtatccatcgaggcttggagcagcttggccgcctccttcagtcgactgcgctttgtctccagtacgctgtctccgtacgctgtcttgcctaccacatctgcagcttgaccataacccccttgcaacacgctcatcttgaagctgttgcccacgtcggagcgagcgatgagctgctgactggcgaacatccgcgccgctcgtgggtacttgcccaccacacgaaggaactcgtccccgcggaggcgcttgccaagctgcaccatgatcttgaagatgctgtcgggcgtgctcaacgggttggagcacaaacctttgaggatattctcctccaaggaggctggtacaccactgtcgatctctttctggggcgcatggcgactggcgttggctgcgtcgaacgtcagctcctcctgcatagtcaccgtgacggggaactcgccttgttggtcgtacaagaccgcggcctcgctgacccagttctccagcgtcagcagaacctgctcacgcgccgaagtcaggccagacgcctcttgctgcagcacaaccttcgctgcgctccgtctgaagagcgtgtagaaggctgagcaggcgtcccccgtcggcaagcacgcagccttgtcgaaggcgtcgctgtcccccgcatagtagctccacacgttccccatactcggtccagatcgtagacgacgacgcttggagaaaaagtcctcaatccgtagtgggacctttgagaggctcctctcgctgatccaaatcggtgccaccccgaagtggatccgatcgtccatttgccacacacaacgcgacgtacaatgccgaacttgcggttgcaggccttgacttcctggtgcaatccgcggccgcactcctcatatcccaactggggccatcattgcaattgatcttctcgaaacccactggggatgaatcctgcaggcctaccacaccagcagctccagctccagcactccacttccagttgtcattctccaattttctcccagcagctcaaaccaagccaaccaaccaaccaactcaccggcacttcgatgtggtcaagcgcaagtcacgacggggcccagcagtccgtactgctggcattcggagcattgactgcgctctacgcgtcgtggaagatcctgagcatgcccgtcccgctgccggatcccggcatggaagacctcttccgtcccgcctcgacgctgccgatactgggcaacaccttggacgtgctgctcttcaaccgctaccgaatgagcgactggatcaacgaccagaccgacgccagcgagggcaaaccgtggatcctccagctgctgttccaaccgccgtgggtcgtgctgtccatgcccagcgacctggacgacgtcttccgcgaccaattcgacgtgttcgagaagggcggcaccctcggcgatatctcgttcgacgtgttgggcaacgggctactcaacgtcagcggagataagtggaagcagcagcgtcgcgctgccagtcacctcttctctacccagagcattcgagatgtcatggagcccgtgatccgagagaaaacacttcagcttcgagacgtcctcgcacaatgtgcagatcgtgaacaaacggtgagcatgaagtcgctgctgggcaagttcacaagcgacgtgttcacccgcatcgggttcggcgtggagctcaaccaactcggtggcgacgtcctcgtcgacgacatgcaccccctggatatcgctctacatgcggtgcagaaccgattccagacccccatgtggatgtggaagctcacgcggttcctcaacgtcggagctgaacggcgtctccgagagaacatgaagatcgtcaacgacatggtgcgtggcattatggtccgatccatcggcgacaaaacccctggagatggcaagaagaacctcttgacattgctcatgaaggacgacgtggacgccgacccccgtgagcttcaagacacggctgtgaacttcttcatcgcagggaaagacacgacctccttcagcttgtcgtggcttatcgtcatgatgaaccggtaccctcgagttctgcagaagattcgcgaagagatcgcatcagtgctaccggggctattgactggagaaatgagcgcaccaactctcgaggatacgcagaagctcgtgtacttggacgccgcggtgaaggagagcgtgcgtctgtggtccgtttcaacgtatcggtgcacgacgagagacacgacactcacgagtggagcattcatcgaaaaggggacggtggtggtcgtgtccaagtacgccgctgccagacgcaagaacgtgtggggggacgatgccgcggagtacagacccgagcgttggttcgacgagaagaccggcgagcctaagagcatcacaccaccgcaattcatcaccttcagcacggggccacggaaatgcatcggcatgcgtctcgctatgctggagatgaagaccgtcatggctgtgttgttcagtcgcttcgacattgagacggtggaggactcattcaagatcacgtacgacttctcgttcgtgctaccggtgaaaggcccactagctgtgcggattcgtgatcgcacagccccaagtgtctaagcgatgaacgcttgtgctgcttgttgccgtttcaacttcaccgaccttgctcgtatttttagtgatctcaatttgacgtctccttcgtattcttcactccattctccgtttgaggtgttgtagctacgttctaccctactacgttgccatggatgaagatcaaaaacaacaggtaatacacatgcaacttgcggtagtacggatgtaaaactgagcgtgtttcttgcttgaacagttgcgcgatgacctgcagttcgccatcatgaaggccgagcagctcacagtgctggatccgaaggctcccgggggatcaaagaagaacccgatggacattaagtcgctggtggatgtgttcgccgtgtttggcttttcagtggacgatatcatcgacaagcatgaccaatgcacgatcttcaagaagatccgcgcggagctggacgatctgcttcgtgatttagccatgaacacaaagaagtacgacaaggccattgtactgcgtgataggctgcgaattatgaagcgcgagtttgtggagatgcaggggacgtacgaaactcgacgccaagagaaagagggccaacagtttagccgtggtatcgtactggccaagcagcgtagcgatgtcctgtgtgcagcacgcacggaggcctgcgagcgggagattttacaccaccaggaggaactgaagaagacccacgaagttgagcgagcgcagcttgaaacgtatctaaacaagttacaggaaccgcacgtcaagttcccgaagctgcttctggagctgaagaacaccgagaagaacctggcccgattgaaactcttcgaggatgcgaaaaacgttttcgttcgtgccgacagcatggagcgggatcagcgagcactcaacacggcaaagtttgagaagttcaaggagaagaagcgcgctttgctcttggagaagcagcaacaagagcttgccgaggccgaagagaaactgacggagaaacgctacgtggtcatgcgaacgaatgacaaccatcgaaaaacgtaagcgatcttttgcgtggaccttgacctgcaagtactcgaatgctgaacttgttgctttgacgttaaagggaagtgcaacgcatgaagaacctgaaggttgatatgaatcacgcgcacactatggatacgcacggcaaaaaagttttctcgacaaacgccgtggcagctgtgcgtaaatctcacggcgctacatcgagcacatatcgaggccagcaactgctgagtacggttcaaggcaaacgtcttgaggttgccagtctctgcctacttcacgacagcgaaaatggcgttgtgcctcccggatcggtacgaatactatgcgaatgtgttgtgtaagagctaccgagctgagctgaaccgtgtattcccctggacagatcatttactccggttagcattagcctcatgtgttgctctgatcgtaacgatctagagacgacctgtagtttcacggaaaaccacacaatgaacgtgttaaggttttcactttaggaacacgacttacttacgaatcacggtagtaggtttatatacctagcaaactagtcacggtggagggtgaaacccgtgccaagctcaatctgagagagctcggccagcacctggttgcccgcgagaatcggcggatacttctccagcgcctctggcgttgcaaagtgtccgagaggctccagcgtcttgtcggatgccgtgtgcgagaagagcgtggaggagacacgccacaagctcttgccagcattcttacgctgagtgatcgcctcgagcgtggattccgccacgacaacttcatggaaacctgcctggacgtatccacccgttaaatactccatttgcttgccggcttggaccagcaggcagccgtcaggaatcttcactgccgtgcgcgtgccatctcgcagccaaatgtacagaccggggaagcgcgatttaccgtggatcgtcagcaagttcaagtctgtttaacattattccaagaaataccgtgaataccccccaacaggtacaatatagatccttcgtaaagttgaaatcttaccgtagtggtaggctgccagcacgtcgttcaactggttgaacacgttgaagttgctacccgtgggggccagcagatgcgggccgttcttgatgcggtccaccagtgcgttcttctcgagaccgagtccaagggcgacaatctccacgagatccgtgatggcgtccagcatcttgccgccccacatattcatgacactttcccactccgggaacttcttgggaaccacgggctcagcgttcagctccttgaattgagtgttctaaagtgaagcaccaaaccatttcgtcagctctctccagctaagaatcgcttttattcagaagatccttttcacgtacctccggacgttcgccgacgcgccagaagaagcggctcttcttgtccgcttcgggaggacacagagacaccggcgcgtgacgcttgtccagcttttccgctcgagcgcagtgattgcgagcccgctccttgcgctcgggcgtgacgcccacctggtagtgatactccggacgcgcgtcctccacaaagtccgtcgactcgaagtagcgctccatcatgtccaggaaggtgtcattgtcgctgtcggcggctcgctacatgtacacaaaacgaataagtaagccgctgcagcttttcggcaggcaggaactactgcagcgctttgcttgccacctcgtcgcggacgcagagcacgccgaacttgtgcagcgactcggcagccttctcgcactcggccctgtcgcccgtggccttgtagtgcttgaggtcgatcacggggatttcgagcatcgcggacggagggtcgacttgagaaatggctgataaccgcacgcgcgacgacggcgtcggagtctggtggttcagagtgtttcgttcggtctctacccgcgattgccaatagggtaagcattcacgacaccagcgtcgatgactgtggagtgcaaagtcttgggagcattgtgtctcgactacgggggcagctactaagacttgcaacacggctcaacccttggatggtacgttgaatcaagaggtgttgccgtggctaactcctaacgcctaactctcttgcttctcctttcgaatggtcttgcagctagtcttatggttggtccagtcctcgacctggtgctctttgcagcagtagaacgccgcctcgcacgcacagcgcagcaggttggtggctccgtccgcgccttcttccttgcgcttggacgagccgcagtaccggcatccgacctccgccgccgtgacctcgcccaccatgacctgcttcaggaacatggtctcgaacgtgtgcgccacgttggtcagcagcgtgaggatgacctgctgccgcatctgcagcgtgagccacacgtcggcctccatgagcttgccctgcttgatcaggttcttcttctcctcgaggatctcgggcgacgccgagggcagcagcgattgcacgttgtgtcccgggtccgccaggtcgatgaaggccagcgacacgtgcttgaacgtctcccccgagaacgtgggcatggtgccattggcgcgcagcgaggccaggtacagcaggtcgtggcggctgcactgatccgccttggtggcacgcgcgttcatcagacgcaacagcaccttgccgttttcctccagcagagccttgagcgtcagctcgggcgtgagcagctgcgcggcctgcgggcgcgtctccttggggtcgtaggacacggggatgtcgggcgacgcgttgcgcagcagcgacacctggccggcgtagggcaacgccaggaaccagcgcatgaaggccgacgcattggagcgccagaagcgcgtgaggtactgggcaggcgactgctccggggccgcgtccgcgggcccagcagtgtcggcagctccagccatcgatgcaggttgtcaaaagtgtgcggtggtgggaccgagccgagtacagtacacgtgtgtaccacttatatggcacagtgtgttctggacggttatgttgcttttgtgaacgcttctacagcgcaacttacgcacttcaactttgccttaaacaaagcgtatctttccctttcgactcaaatgcggttgctaggctgtcaacggtgattcgcctggcgctcaactcgcgagaggcgtgcactgcggagtctctagaacctttgatggtctaacaaccggtattggccggaggtttactcctggaactataaacctgtaaataatacatgtaggaccccaaacctgtaactacaccatcccgagtatatgaatacacagtgaatacccttttcaactcagcctacacggaggcgcgccccgttatttgttagtcctcgctagcacgtggctggggatggctcacgcacagtatcgtcagtgaagtgctagccgttcgctagccgtggggcacggtcacttaacaactttctcgaggactccaagtacagtcatgcgacttcagcaagttctactggtggtggcactcatccttatagctgccacctcggaagcctccgagagaatgaataccaagatcacaacgttgcccaactcgattgccgaagaccgcagcggtgctattcagaaccgtttgctgcagacagacaacaacgccgacgcaacagactctgatgagagggctgaaggtgtgttttcaaatatcctcatgcatacaaaagtaaggttgtggctggaaagggggaagaagaacgactatgtcaaggcgaagctgaagctcaacgggctggaaggagcagccctgaaggcgcacaagaactacaagtactatgaatactttgccaaaactcttgagggttacaagcttagcaagtggcttataagcaacccggagcgttgctccgggagggtacacaggtcggcgaatagtttcatggacgatgataacggataacaattgagtaaatccccaagttgtgttgtttttaatccttttaaggattttaaaagagcactaccagccgaactctctagttgatactaacgtgggcagatgctgcggctgcttcgcagccgcagcatctgcccgggaataacactttggtcagcgtccaatggctgcgttgacgccagcaacgagagaactatttcattcagtttgcaggtaaggtatactgtgctcatttagtactatgttgtgtgctaacgataagacgagagagctagcggaacgaaggagagatgcatggtgcgctgatcttgaccatttaacttgagggtaaattgcggaatgagaaatacgttaatgtgccaagtccttggaagtgggcgcttcaacacaggtaaagaaagcctaattcaaacgaacgatgctcgtgtcactgtcgagttgagctggttggtttggcgagagacacgaggttgggcatcttcggctaagtgattgagtattgagcaaattgacatgtaaaaaatgcagcctgcagctagacaagtcatgttggtcatcttcagctaagcttggtcgattatggcgcaaattgatacgccttcagcgaggccatgacgctctcatagtgtactggagcgtccgtaagtgtttgagcgcaggttttggtaaagaatgaacgattagtatcaacctttggtaaataatgtgcataaatcttagcatttatcgacgggtacccgattccggcagatattagcttaaacattacaattaagaaagagagacccggtttggtaaacccggttttggaaagttacaagttttttgccggggccaagcacaggtcttcgacctgtgaacaagtggtaagacgacattccaagtctggaaggagctcggatttcaacatgttaccacgatggatggcctgaagcagatcgaaaaaacggacaagttccggatttacgagcgatacgtgaacgacttcgacaagttcgcaatgatcaaggttaaagccggtaacccactccctgcggagatggttagcagggaagccacccatgcggagatagtagcaagaacggcgattctggcacacagtggaagaggtgaagattacgcaaaggtggcgctgggcctgacggaaccctcgaaccggaagaaagcgctcgtcgggcttgaactcaaagactttggtcgctgagcttcccaagaaaaagaccagctaagttaggtaggcttggttacgacaggtagaacagtacctgtatatggtgctagcaatatatagtgtgctcctacacgtgggctttggcatgcttcaaattcactccgtgcaaaaaggcacttcctcatcctctccactggagactccaggtctactgtggcatgacaattcatagaatgtagccatctcactgaatcgacaataaaattcgaagcgcttcaacgcgacgacgctcattgagcgtgagtcctatatggcgcgcggccttcttactgtatctgacggtcgccgtatcgagcaagcgcggcacgccgacgacagccccacgttggctagccgcagctaatgctgctcctcctgaactgccgctggccctcgccaccaacacccgtcgccggcaattttcagctcgcgcgacgccggctgcgtgtgtccctgggacacatggcaccagcgtgcgccccatcgaaaaaggcgcggctcggcatgtggcgtgatcagcggcacgctggaagagcggcaagcaagcatgtgatctccatgcatcaagaccagaatgcgagccaaagcgattaatcccgctcgccgatggcttcgcgctgcagagccttcggaagccagggccccgatgtgtttgcatcacttggcgacaggctcgaccaagcgagcgagttattgtatctcggtgcagacgagcgacggcatcggtacggagcaggggcgagaatccaggcctgggcgccccagcagcatgtcctaacacagcaggctgccgggcggaaactcatagcgtgtactcgccgcctgcattcccccgcagcatcagcgcgaacgcatctggcgccggctattttaatggcatcgcagcgccgagcgccgctgctggcagctcgccatgagcggagccatcgcgagcggatcccgcagaccaggcttcatcttcctcgtcgtctgatgccgtacctacgcacgcggggcaaggttttaagccccagacgtcttttcattcgtcgaaaacgatataggggtaggtgccagatgggtttttctcacggaccgtgtggttgtgttgcacacgacatacactctgcagggcctatccgttcccgctggctaaccgccccgggtcaaatcgccactacggccgcgcgctgagccctgcctgcttgctgccccccgccccgcgctggcacgtaagaacgagcctctgcgcgcgcgttgactcccggacaacgacaggttaggctctgaaccctctcgcgccgggcccccaagcgcgccaacgccgtctcctgacgccgcccccgccgcagcgagcagagagggaaggccccgtccaagaacagcagcagcagcagccatggaggtcggcgcccccgtgtgggtcttcgaccgcgaactgtggcacgaggcggtcgtcgccgcgcccgcggacgcctcctcgggcctcgtggagtgcgcgctggagcccgagaccgacgacgagcacctggtcacgcccgagggcgacgacgtcgtgccggacgcgcaggacttccagacgccgcgcaagcgccgcaactcgcgccgcaactcggtgcgcaggaatgtatccatctcggcggacctggtgctgccgcgcagccagggggagcactaccacaccgtgcaggacctgaccaagctcgtgcatctccatgagccagcgattctgcaggtgctgagacgccgcttcttccacggagagatttacacgagcacgggccagatcttggtggccatgaacccgttcagaagactcggcatgtactcggacgacaccaaggaccagtactacaacctgggcggcaacgccgaggccgacaagagcacgctggccccgcacgtgtactccgtcgcggaccaggccttccggaccatgctggtgccgcgatcgagcgacaagaagacggaccagaccattctggtgagcggcgagagcggcgccggcaagacggagaccaccaagctcatcatgaactacctggcctacgtgtcgaccaagcgtacgcgccgcccgattcgggcgagcaactgcgaccaaacgacgattcatgaccgagtgctcgagtccaacccgattctggaggccttcggtaacgccaggaccacgcggaacaacaactccagtcgattcggtaagttcattaagctcgggttcacgtcctcaggtgaaatgctgggtgcctcgatctccacgtatctgctggagcgtgtgcgtctcgtttcacagggcaagggagaacgaaactaccatgtgttctacgaaatgtgcggcggaagctctccatcggagcgcgaggaactggcactgctggacatccacgactacgcgtatttaaaccagtccgagtgctacgaacgcctggacggcgtggacgacgccgagtcgtatcgagtgacgcgacgagccatgtcgagtattggcatgagctccgatgaacagctcaatgtgatgaagattgtttcggccgtgctgcatttgggcaacatcagctttacgactgccacccgcaacggtggaaaggatgatgcctctgtcgtggatatggatgaatgtggtgacaacattcgagctatttgttcgctccttggcgtggaggtggatgtgctacgcagcacgttgtgcacgaagcagattaaggctggcgccgagttcattacgacgaggctgcccgtcgctcaagcgctctcgacgcgggactcggtagtcaagactctctactcaaacctatttaactggcttgtggaccgaatcaaccgcagtatcgagtacaaggaagaagccggcggcagccagtttattggtgtggttgatatcttcggtttcgagattttcgagcaaaatcgtctagagcagttgtgcatcaactacgccaacgagaagctgcagcagttgtttggtcggttcgttttccgcatggagcaggaccagtacgtggcggaggagatcccctggaagtttgtggactacccgaataatgatgtgtgcgtggcgcttgtggaaaagcgacacatgggcatcttctcgttgctggatgaacagtgtctaattccccgtggtaacgatgaaaaactggctaacaagtactacgagctgcttgcagggaagcacgagagcttctcggtgagcaagcttcagcgcgcgaagggtcagttcgtcattcaccactatgccggcgacgtgtgctacatgaccgacggtttttgcgataagaacaaggatcacatgcacactgaggcggtggacttgcttcgcacgtcaaagttctccttcgttcgtgcttgcttcgaaaacagtgtgaacggtggaggtaatagcccgagaagtggtcggaccgagtcgcgcagcagcgattctactactcgccgccgctctggagggggtatcatgtcttctactgttgtagcgcaattcaagagtcagctgagctcgctgctggatgtgctgaacgcgacggagcctcacttcattcgttgcatcaagcctaatgaccaggcaagctcgtcgcagttcgatcgaaggcgtctcctagagcaactacgctgtagcggtgtgctggaagctgtcaagatttctcgcagtggataccctgtgcgttttcctcacgacgtatttatcaaaacgtacagctgcatcctgtcgcaggtaccaaatgcacaggggcaggcagagaaagaagtggcagcacaaatggtggagaagctggggatactgctcgacgtcaacacggattcgaaacatcctcctttccaggtgggtaagacgaaggtcttttgcgtccttgaagctcatcaagctctggaagccagtcggtccaaggctctgtacaagtcagtgatcacgttgcagcgctattgcctgggttactctgtccgcactcgttatcagcgcaagcgtcgatccagcatccgaatccaagctatttggcgctcttggtcatgctggaaccggtatcagcgcatcattcgtcgtgaacgcgcagctcttactttacaaaggactactcgcggcttcttggcaagaaaacaggtcaagcgtgttcgtgcagctacgattatccagtcgttcgtgcgtgggtggcttgttcgtcgcgagtattctgccaatacgctgagcttcgagcacgacgtatcttacgtgggttcattagatgaacgcagcaccactgcaagctcgatttcactatctgagtcaatctcgatgaaggaccggaagaacacaacaatctcgttccagagctcagttacaagcgaccagagctccagtgagtacatgggcgacgacggaagcatcagcatccgcagcagctctcgtatttcccgaaagaagctgatcgaggagtacgaaccgcccaagcagatccagaacgagtacgaaatcgtgtgggaatgcggtctgcttggtctgtacttcgagagtgaccctgtttctggcatgcccattgtccgtcgtgtgcatgaaagtttgagcaactgtgccgacattttcgaagtttctcgtggagacgttcttctcgctgtgggcaaggtgaaggtgaagaagggcgatatccgccgtattctgaccttgctgcaagaagtgcagaaacctgtgcgtctccacttcctccgcaatccgacagaatccttccgtctgcggtcaggatcgcttgaactcctgggcgaagaggattacgaagtgttgtggaaggagggtgtaccgcttggtcttggattccgccccgacccaagcactggatacccctgcgtcctccagtcgcaaggcaaccagctattgcctggcatgttcaacgtccgtgctggtgaccacctggtcttcatcaacgagttttcaacgcagggtgtgcgcttccagaaggtgatcgacatcctggagagcggccctcggccagcagtgctgcgcttccgccacactgacctcgtggaagatccgcaccagcagcttgatcaaacgaacccactgagcagctcgacgctgtcgaaccctcaggacgattcgaactcgatggggatgtcacgcctgacgcggccatctcgtgtgagcatgaacccgaagaacgaccactcactgtactacatcacgtggaaagaggaggacggtccgttgggcatcgtcgtcaagcaggagagcacaagctactacccgcgcgtgatcaacgtgaagagcgagggtgctgtgacgcgcgaatcgcagaagaaccgagtggagattggcgatgtcctgctgagtatcaacaacaacaacatcagcaagatgggcttcggcgcagcgatgaagctgttgcagaagggtcccaagccgctccttcttatgttccagcgcccgcgcacgtccttgtctatgacggcgcggactctgtagtcctcgtctttcgtcgttggtgttaaataatcaagttttgggccgcacggacagcaaagtgacgggcgatctacagctcgagaccgtcacgtctgcagacgaggatgcagtttggtcaggaggacctcacaggacattacagccgcgaggaccccaccccgtacgcctccactcgagactgccgttcagcttcgtagtgggattttttcgaatgcggcgcgttcgccttgaaagtattttcaatatggttttgttataaagaagtcgagctttcgtgtgcgagtgcgttgcgttcttccatcacgtttgtagtccttaccacagtacagttatcatcactctccaagagatgatcaagaccaagcacgatggtttcaccacgctgatgaggctattccgccagataactaaggcgtgatgcaagtaaagggtgcacttgattgcaagagtttcaagaattcaccgttagctatcgttaaaaaaaggagttctacaagggtgaagaagataatgcatcagagctagagactggatagggatcctttgcagctctactccttcttctcctggcggaggtgggagaggatggcgtcgatgtcctgcgagttgtccgtgacaaagtggcggccctcgcgctcgaccatctcgcccttctcgttgaagaagatgagcgtgggcaccgtcttgacgccgaacttctcgcacagctcgagcttgaggtcacggcgcgcgtagggcagcgcgatccagggcatctcctcgtagtactcggtgaacttggcctcctccttgtccgaggacacgaacacgatctcgaagtcgtcgtggccggcgcccttgatgtcgttgtacacgacgtccagcagcggcgtgaacttgcggcacggcgggcagtagtggccgctgaagtagaggccgatgaccttcttgccggccagcgcctgcgacgtggacaccacctcgccgctcttgagcatcagctccttctggatcagggcctccattgtgtcgagttggagttggctgggcgttaagtgtgcgcgagcgtgaagaagttggaatggcgcggagactacgaagcgggccgctattttggcgggaacggtgacaggtagcgaggaggtcgctcgattggaggatattggatcggtcagaaggagaggcctgattggctggcggaggaaatgggcacattggacccaatactcaagcgaagttcactgctgaaactcaacaaggtggggttgctgggcgtagcactcaacgacaaggtggatctcccgacagagcaggagaagacgcacatcgaccccgcgtgacatccttgctgttgagaattacacgaggtgctcatttacctctaatttgggccatcaaagcagcatcctgattggttgaaggatgattgcaaatcaaatgggtactgctgacgcgatatggctacacttgattgtcgacgaatgatgaaccagtaccagaacggatcttgtcgccaattcattttgttcgcgagttgctcgccacctcatcctttcgctgcaactacactgctttccttacgcttctgaaaaaaaactcaaaactgttcgacgcaggggcgtcttttgtgctcactcgctgctgcagctgtcgatctcctcttctgctcttcctcacttcatcattttcactggtcttccttcatctccatctgcaaaacctcgcacgtggctcaggtggccacgtcttgagcggcaggctgcagtcgagacgcgcgcgccacttagcagtaccaaaagccaccccacgagcgtccaaacgggcagttcgagccgtagacgaagcggccgtagtcgttccagtagccaagcggatagcgccagccgtagcggaaaccaccggcccacgggtacgtgtagcgccagcggtacgtgatgcctcccgtcgggatgtagcctcctcctccagcgatgtactgctcctttctggccgggagcggttccttgtcgccgagcaaagtcactccgggaggagcatcctccaacttagcgtcctcagcagccggggctgcaggcgcatcgtcagcgtgcgcgcagctcaccatggcgaccagcaccaccagtagaagaacagcgaagcgcttcatcatgacgtcaggaaactcttgggggcgctcgaccttgggtggagtgtgctcacagcggcgcaaaacgctgaatgactcggatctcggcagctcgaagcaagctttgcgcttcaaggcagttggagaaagttcttgcttcaggttcagcccgttgcaacgattgttcctgtcgcgcgaaatgcagggtgaggactcgcagcacgtgcggggagcactttgaagaggcaagcaggccattgtgttgaatggcgccacctgactcccgtcgcagatccccgttctcgtaaccaatatcatttcgccacaacttctgattgttggtgactagtgaacgctcttcgtcttcgctttgaggatagctgcgctgttggcagtgtatagcggacgtgtgtccatcgcgaactcgttaccaagacggccgagttagatatgtgcagtactcaaagacataccgctgctggaacttgcgctcgcgcaaactcggtgccgtcgagtcgaattgtacgaagaggtgctgcgtgtgcggaagcaggtgctcggctcggagcacaacgagaccatcatggcgcgtcacaacctcgcggaggcctaccgctcgagcggaaacgaggacaaggccgtggttcgcttggcagcgaaagacttcattttgacgcttggcattgcaccagtacagtatgtatgagcattctcgcggacttctgtcgcaggggtgatcttggctggtgctgagtgcagacttcaaatctgtaggccattcggttggcaggagttcgattctccctcgcctgcgcctttttcctaagacatcaaggatttgaatccatgcaaatcctacagagagagcatctccatcaccttcccattttgacatgcatcaaaccacggctcatgcagcgatccaaaacgaaaagaaagagagagagagagagagagagagagagagagagagagagagaacatagagaagaaacacaaaccccggagctgcagctcagtgagctggccgagccaactcgctgctcacaccagcgctgcgtttcttcaatgataagccgtcatgtaatcacgcggggcatccaagccgcgcggccaagccgttccctcggcggcatctcattggttgtcccgtacgtcacgggcacaaaggccgccgcaacacgccgtccaccgactcgtgcgcgcagttccgaatcggctctcgagcgactagcaagacctcctccccctcctacctctccgccaccatgccgcgccagctccagcccgagcagctgctgacgcccgtgccgtccgacatcgccatcagcgacgccatcgcgccgctgccgatcacgcagatcgcccaggccgccggaatcgtgcgttgacacaagatactttcgggctttatggaggctacagagccgatatttgactggggctttgtgcgctgtattgcaattgttgccgctgctgtagctgcccgaagaggtggtgccctacggctccaccaaggccaagatctcgctggacgtgcgcgaccgactcaagggccagcccaacggcaactatgtcgtggtcacgggcatcacccccacgccgctgggcgagggcaagagcaccaccactatcgggtgcgtttgaacgaggctgcggagctgtcggtggttggaactttaaagctaactcgtgggtattgcgtagactgtgccaggcgctgggtgcacacctcgacaagaaggcgttcgcctgcatccgtcagccctcgcagggcccgacgttcggtgtcaagggaggagccgctggaggaggctacgcgcaggtcatccccatggacgagttcaacctgtacgcgtggaggttgtggctgaagtggtaggggagcttgctgacccttttggtttatttctgcaaaacaggcacttgacgggagacatccacgctatcactgctgccaacaacctggtgagtggcattgtgtagtcgaagctattgccatgggacgcggtttactgaccacgcatcgtttgctttgtgtgttgtagctggctgctgccattgacacccgcatgttccacgagaacgcacagagcgataaggctctgttccgtcgtctgtgtccgactgcgaagggcgcctcgggcaagttctcgccggtcatgctcaagcgcctgcagaagctgggaatcaccaaggtgacgcctgatgatctcacggacgaggagatcagcaagtttgcgcgccttgacattgacccggacaccatcacgtggcagcgtgtgctcgacacctgcgaccgcttcctgcgtcaggtggtcgtgggtgctggccctgctgaaaagggtcagacccgcaagactggcttcgacatcacggtggctagtgagatcatggccatcttggcgcttactactagcctgcaggacatgcgtgagcgtctgggccgtatcgtcattggcatgagccgtggtggcgagcccgtgacggctgacgacctgggagttggtggcgcgctggctgtgctcatgaaggatgcgatcctgcccacgctcatgcagacggtggagggaactcccgtcttcgtgcacgctggcccgttcgccaacatcgctcacggcaactcctccatcatcgccgaccagattgcgctcaagcttgctggagaggacggctttgtggtcacggagtgcggctttggtgccgacatcggcatggagaagttcttcaacatcaagtgccgcactagcggtctgaccccgcagtgtgtggtgcttgtctctacgattcgtgcgctcaagatgcacggtggaggcccaaacgtggttgctggcaagccggtaagttttcgtgagctgcgtgagatgctgtgatcgtctactcactctctccgttgtgtgctatgccattagcttgaccctgtgtacgttgaggagaacctcgagatgctggaggttggctgcgccaacatgcagcaccacatccgcaacgctctgaagttcggcgtggcggttgttgtggctgtgaacgtgttcgccacggattcgcctcgtgagattgagctggtgaagcagaaggcgctggaggctggtgccaccgctgctgtggagagcaaccactgggcgctgggtggcaagggcgcgaaggacttgggccaagctgtcgtcacgtcctgcgagaagatgcgtgctcagggaagcccgttcaagttcctgtacccgctcgagttcagcatcgctgagaagttcgaagtcatctgcagtacggtttcccttctcttgctatgcagccttgtcgagcttcctactaacgcttcttttcacttgaacagaggagatctacggtgctgatggtgtcgagttcagcgaggaggccaagaagaagcttgcagtgtactcggagcggggatacggcaacttgcccgtgtgctgtgccaagacgcacctgagtctgagcacggacccgaccgcgaagggcgtgcccaccggtttctccgtcacggtgcgtgacatccgcgcctctgtgggcgctggcttcgtctacgtgctctgcggagacatgatgaccgttcctggcctccccacgcgtccgggcttctacgacgtcgaccttgacaccgagactggcaaggtgatcggtctgttctaagagcacacagagtcaagacaaggcgtccgacatcgagcaaagggcggcatgtcgtagccacacgcccccctcccctccccatccaccgcgcgcctgctgcagctagttagatcccagacaacctggaaggagtcaagtcaataaacctgttccttacatccatccgtgtccatgcagtgtatatattgtcagatttcgagtgcgattgagcgctttagctcgtctctgcggtggctgcggctaccagcgtctcagcattcggagccgcgtcctcgggtttcccctccgagcggttgctgaggaacgtctgccagtggtagaactgctggccgtgcaccagcgtcatgaagtcctcgcgcgcgatcatctgccggaagcgctcgtcgtccagcatgtccaggaaggcgaggcagtgcgggtacacgatgtacttggcgtactgcggctgcttccagtacttgaggtactgcaggtagttcatgaaggccgggttctcgaagtaccggttgatggcgaggactgcggcggccaaaggagagcgttaggcgggcgagagcaagagagggaacaatagacacacgcacagttgaggtacgcggggctggccaggcactggatgaactccagctccatctggaagcggatgtcgttcgacggcacctcgatgctcgcggagctgctcatattcgctaatgtacaactttatcatttctaaattctaaatccattacagatataccgtttctaaaatctggagggggtactattttagatttggaacgtcgattcctgtaaaaacgtttcaagtccaagtatattttcctttcatttgttgaaaaacctttgtggaaggaaaactacgcggccgttgttgctgtcttcaccttcttggcctcctcgagatggcccagatactgtttgtagtacttgtagcccgcgtgcgtcgtcagcgcctctcccgacttcccgagtatccccaatgccgctttgacataatcgtccgaccgctccgtagctgcccaaatcagcactcttgacatctcttttggcgatgctttttcgctaactagcaccggtggctggtgtctgttcttcatcgcgatagaggcgtaatagtcaaacatgttcacatagtggtaattggtccaatatgcgggggtttggtggaccaaatggagggggacgtcttccagccccaacttcacccatgcatcgtacgtggagactcgacttctgtaccactcgccaagcttgtacttttctgccgttttggcgaacttcgcgaaagtcttgaagttgggatgaccagtgagctcgtctcccgatcgccccgtcagctttaagatcttcatcacctgttcgtcagttttttcagtctccagccaccaccgcactcggagtgcattgtagaatctcgtccacaagttctccctctcctcggaaacagcgcgtgtcttctcggctcgcagagatcgtccgtgggcaccgttgtagttaacagcgttacccgggatgcagggcgaacactcaatcgatgtcttggtctgcacagcctcggcggccgtcgatagagcgacgctgacgcagatagtcacgaaatcgccacggaagcgttcaccaaacgcatggttgtgagcgaaagtcgaacgagcttcttgaggcgaatcgcgaactgccagagagaaggcaaaaacgcatcgccaagctaatcccatgcctatcactctcagagttctgcatcctgcgatcggtgattcgaagcacaaaggcatacgaaacctcgcttgagcaacttgacttgctacagggcacaacattgcattgcattcgtgaaaggtaaagcgacttcagattacgatgaatgttgaggctgattgatgtggacggactgtctccactttaaaaaactatttcggaactcaaatgacgagctcggctcggaatgccatcggatcggagcccgacgacgatgaggtgggggtgaccggctcggcagagaacagagcatgcgcttggtcgtcgtgctcggcctcgctggaccaatctgcttcgaacgccaggttggacagcgacgccttgaggtcttcgtcgtcgtcactcgtctcctccgtgtccgcgtcgtccaggcgcaaaccgttatgagtcatcgcaaaattggggtggcggtgcttcagctcgagcggtacgatgggcgtgaggcttgctggggacaggcagctattttcatactccagaaacatcaagtcgtcatcgtcttcacacgacaacggcgcgaccgcgcgcgatgccaacgaggagctcgacgcaccgagaggattcctcatcaccgagctgaactcgtcctcggagagcacgaagctggacgagtccgcgaagtgccccagcggactgctcaggctgcggatggtgtcgatgcagcgcatcattcgcagcgtgagcgggatcgtggagaggtggatccatagctgcgtgctcgggttgcttggcagcctcaccaccatacgcatctgctgcgatgggttgaacgccaacgcactgctgtagctgcgctgctgctgctgagcccgtagaaagtcctcgagcttttctgcgtctccgagcgtcaggaactggagcaggttgccgccgtagagatccgctgcattgtcggcgccaaacgtggccgcacacgtgtccgccacgaagatgaactcgcccgacggcaagcagtaggcgatccgcttgcccgagggcacctggttgatctccagcagcgtgacagtgccgagccccatggtggtcgtcgactattggagtccgggcgacgtgcgcgcgtccgttctcttcgaggtgtcagcgcgtgctgctacgaagcacttggaaaagtgactgacttcgactcgactcgactcgactcggccctgagcgaggcctgccgtcgtgggtagtgagtgagtgtcgtgtcgtttctacagttcggggtagacgagcacacagcagtgggcaataatgagtatggagtgcaatgcaatagcagagtgaggatccctgcctctagttataagaaccggcagagagattggtgattgacaggcagctcacgctaatgatagcttcggacggctggcagcgtgggaccttgacacccgcaaaagcacaatgcggtgcggtgccggcgcgggttgggcgatgagggcgaggaggacgatcgatcgattgggttttgctggctgcggctcggtgtttggttggttcgttggtcagttggttggttggttcgttgtcgttgcacccgttggcgccggcggactatttggccagagcaacaatgcggcgagcaagtcacggccatcgatcgacaaggcaagtgcaagcaaacatggaatcccgacggcgcgaaaccagattgccccagtttggtgccgtgcaggaacacccgtcacattggtttctcccggaaatattggggtatatttttatacaggagccaagtcaatactaattcagtttgtagatgctaactaagataacggattggcaaggatggcaataatatgcaggtagcgcaggtcgcttgttgaagttgcagggctcggctgacgtgctactggtacactgtgcctcttctcaaaaaacgcccgtgattggtgaaaaagactgtccagccaattagttgaacacatcgaagatggcggacgagcaagagccaccagcggctccgctggacgaccgcgagtatcctgtggtgctgggcgcgtcgctgctcgacgccgacgcagacgaagagcagcagcagcagccgcgcgaggtgtttacgtccttcggctatgagttccagcccgcgtcggtggacaagagcacgccaggactcgtgagcgtggacggctccaacggcgctcacgtgctcatgggctcgtccacaggcgcaccgggcggcgtgagcttcaagggcaagctggtggagcacaaggacactgactgcttgctcatctttgacggctcagtcttccggctcgagcgctgcccgttctcctgcatgcagctgcgtcacgtgcgtgctccgcctccgcggcggcgtgtgatgatcccgcagacaactgagcaagcaagcggcactggtgctgcagatacgaacgaggtgggtacacccgctgcagcgacggcagcagcagtatctaggacagggaagaggatggtgggcaaagcgaagacgccagccaagcgatcggcggccagaccaaagggccccacggccgtaaagcgacctagaggcagaccgaaaggaacgacaaaggcagtaatggaggcgaggagagctcgtctgggggaaaatgcaaagaccggagcgtgagttgtggtatatacgcggcggaagttgcagcggttgcgtcacgtgtttgcaggaaaaatccgtcgcgcgtcgacaatgcgcgcagctcgacaatagcgcgaggcacttcagcttctctgtgacttgcattgctatcctccaacgcgtgtcatgtttatgacggcgaaggcggcgtcgtcacatacatatcgctacagtattgcatcacttcggtagccgcatgtgcgacgccttcttctccggaaagcgttgtgtgcaccacatgaaacaatcgttgaaaagccacatagaatctgagaacaaggaggtgggggggggctccgtacatacaaatgccaagtcaaatcaggtaggtgcgacctttagtgtaggggtttctgttcttcaaagtgaagaacaccggctggtcaaaaggggacggaagaacgcgaaagcctccagcagtcgcaacaagtcctcccagcccagcagcgcgcgccctcccatacccgccccaagtaccctccagcatgagcaaagccaacaagcgccgcgagacggacgtcatgaagctgtgcgtgtctgtcccatccgcgacgaacgtaccagaaagggggaactgacttcgtgcctgcctgttgcgcgcgcctgtgagcagcatgatgagcgactacgaggtgcatctgacggacgagaccaagaccaacgacctcgacgtcaagtttcacggcccggaagacagtgcgtgcagcgtgaagctcttgtgagtgtgtctaaaggagctggcttgtgctgacccggacgcttctgtcttgtgtgtgagaagccccgtacgaaggaggttgctggaagatccacgtgacgctgcccaaagactaccccttcaagtcgccgtccatcggcttcgtgaaccgcatctaccacccgaatgtggacgaaacgtgcgacgtcttcctagtgctgttttaactcggatgagctgctgagactaacgttttttgccatggatgtggggttgaccttcaggtctggatctgtgtgcctggatgtgatcaaccagacgtggagccccatgtttggtaagattttatatgagtttagctgtgtgttgaggatactagtactcgtgctgattcttttttccttgaactcttttgttcagagctggtcaacattttcgacttgttcattcctcaactgctgcgatacccgaacccaagcgacccactgaacggagaggccgcctcgctgctcatgaaggacgccgagtcgtacaatagaaaagtgaaaggtgcgtgcgcaaccccagagtcgagtgtatggtcggtaggctaatttgaaagtattgtctggatgatgcagagtatgtgcgcaactacgcgtcgcagcccatcgaaatgggcaaccaggaagaggacagcgatgtcagcgatatgagcgacatcgagtagtgcgtgttgcacactgactcacttcacagtagaccgaccgatctgttgaatgctgctcgcagtacaggtcataagctagatcttactatgtctccacgctgcatgtttcgaatgtttcaactagctattcctttcaatgccgtaacataacgataggaataacattttttttattgtttgtcctctgtccctaaggttatgaaagtggagttggaatataagaaaactgcatgcatatgtagcatggctgcaatttatcaagtaaagcgaatgcaaaagtatcggtgcattagtctaagtagaacttattataagccatgggaatcaaggatcgttaacttttcttgtagctttctggtcgggtagacatagctcatgacgtgctggatatacggcggcgggaacaatttcgcctcgtacaagttcccgtcccacacaatcccaaacatatcggcgatatcagcgtatgagactagttcgcccccgtcctctttccagacatatgacaagtccaccaagtttttgcttcattcgcagcacagtccagcagttgttgaagtggtgcttcgtaacgccgcaagcactcgcctaaatgttgccagttcacgtctccgcccagttcgccagacatctcgtatttagcaagatcatggtaggaatggcaggtgcggaaggcagcgagtaacgatcgtggatggccaagcgttgtcttaaaaagatggtcaacgatctccttcacttggtaatcattaagtttgtagtgctcctggacagtcttcacctgtttcttgtccctataggtattcttgatgatctcttgaatcgctggcggtcgaagcaagcgaaggctcagtcgtcgaacataaaataacctccactcgaagcaagataattgaggaagggcgcgcatccagcaatcaggaaaaataaatgtttgacacaaaacagtggccgcaaaaccattttgcagaactccatgaatcgattttccttggcgagagcatcaagggtggaggcgtcaaaagccgaagcaatatcatcaatcacgatgaacaacggaccaacttcgatcgctaacggcatcaaaatatccacgtgatctaggtttgcttcaatcgaatcgagagcacgaggtatggtgccatagttctcctggaagaacgcacgaatggacatgacgaaggtcgcgcgagccttctccctgccaaaactcatgtcttcatgaaacagatccgtgggagaaagcttgactgtaatggtgtggctctgccgaagaatgttcagaaaatctccatctttgtccgatgctggcaaaccatcccattgccgtcggcaggtccgaatgtattcctgggcgaactgggactttccgagtccagatatgttgtccaacaaagggatcatccacatgttgccgtaaccacgctttgcacgattgtaattgcttttgtgaaggcgtacaagctcttgagtggtgctgtcacggccaacgaaaaacagtctgcctccttcaacacaatagactggctgctcttctttccatttccacttggtaccagcaacgcctttgcgccgttttgtcgggttctcatcaagttcgccctctgtactctctcgcaatcttgtgcgcactggaacttccacgatgatcgccgtgctccttgtgagaccgaacggaccaagctgcacgttctcctccagcgggctcttctcgtggtcgtatacttggagattgaacacatcaattccatcgaggtaattgtcgttgaatctcttcttcagagcaaccagtagacgctcgacggtcgcagtctccgggatggggaccgagcttggccgtgtgcctgggaataaatcgccagttcgagcattcgtcagcttgaaccaaacctcaggcacctccacgataagcggctctgcataattctgtccaaacccgttcagctcctccaaaagcgtttggtcttgtcgcgccttcgcgttggcaaacactttcaggtcgggtgcgtcgagccctggggggagtaaagcttccgtagcgctacaagcagcattcttgaaaatgacaagcggcgcatcttgcgctagatccacgtatctcagcgaggctaccaggccaccttggcgatccacgaacttaaaccacaccctgatcatgcctgtactgaaagaaaagtgcctgctcccacataacatattatgagtgatgggattcgaactcggggtcaattgaacaaaacccgtggccaacttcatttgatttcaaggttgtgcgatgacatgaaatacgttggggttacttggaaaggaagttggaggaatcagcctttcgctgaatgtagtgggcgtttctgcgaagacgatcgcccatgttgctctcgccatctagatatgccgccgagtgcagttccctacgattccgacaaacacaatgttagatgttgtgcctaagccacaagtaagaaacaatcgctttaccggaggaattctgggttgctgctcgtggcttcgtgctcgcgcttgtctagctcgtccttcttccgggacgcacgcttcgcgatgtattcgtcgcgctgcttggcgtcttcgaccatttgctgcgccatgcgctgcttctcctcgtccgtcagcgcacgagattcccggtgagaagacgtcttgcccaatttgcgacggcgctcctcttcctcaaggcgtttagcctctcgggccttggccacgtacttggcgttgggtcccaacgaggttttatcaacatctttggattccacagctcccgccttgctgatgagaccatacttcccttccgtatccagaggtttacgcctcgattctggctccttgtcacgtcgatcaccatcgcgcatcttcgaatccctctcacggtcacgagaggggctgcggtgtcgactgcttcgttcgcgatacgagttcccacgggggctgagttcgcgctgtttatcacgcctgtcaccagagctacgggaacgatgcctgccacgataatcaggacttcgagagcgatgtctgccacgacgatcaactggactacgggagcgacttctgtcacgatgaccatggtcccggcggtgtgtatcccgggaatagtcctgtcgcggtggtgttctgctgcaacgctccgccactgttcgaattgcacgtgacgagggtctatcacgaccaaaatcatcacggtcctgggggctttggctacgtttcctctgttcacgtcgcggggcgctgcggcttcgactgcgatagcgtcgatcgcgcgttgggctcgagctacgtcggtccttagagaaacttctgcctcgacgacgctcttccccgtgcctatttgtgctcaaatgcatcgaacggtgattgctggggctgcgctggcgacgttctgcttctcggccactgtaacggggatagcttcggtcacggccacggctgtgatgactggtggcgggcgatttcgatctactgtacgaccttgacggcgatctgcctcgctcgcggtcgcggccttgtccacggtggtgcttggaacgccgataatccgccttctcctcatcttcatctccactcagatcacttgcatcgctgtcatcctctccgtgcttgcgcttcttcttgagccgtctcttttcctctttacgcgcctgcttcttctccttcttggcagctttcttggccttcttgcgtgcctttttgtcctccttcaaccgttccacctgatccttgatctttttcatcttgacggggttcttgagcacctgttctcgagcagcctgctgcctcttgcggatgagcatcatcgggtcctcgttcagccgctggaacgcgtcgttggccggcagcgcgctcttcgtgagcgctaaggagccgtacttggtggtggcgctcaggtccacgtcccccttggccgccttctcgtctccgcccttgtactctttgcccagcagatactcctccgccgtcttctcccgggcggccgacgggccctcgtacatccagtcgaggcgctccacagccgccgccttgttgccctgcgccgcctgcagctggcgcagctcctggagctgccgctcctcctcgatgttcttgcgcagctccgcgaccttcttctcctcggcggcgtgcttctgctcggcgatccagaccttctccacattctacagggcgggcaaaggaggaggaggggagaaataaataactaaaagttagccttttatgacacataagttttagggcgaagaagagcgagtaaaagctcgttcgacgcgggaaaacacggagagcacgaagaagatgacggtaattaagtataccaagcgctacgtacgcggaggttggctgtatgccagctcttcttggacaggaacgctaacgacatggcgcctcgatgctcttcttggccaacaacacactgactgaggctcagtcactgagctcttcgatatcgtacttaaggggatagtttatgtgtaccacgtaacaggtctttttgctgccacttcaacttgtgtatcatggagagtcgcgacgcgcaagatgccggcgctgtgcgtcgctcgggcgcgttctcagggcggcaggtgcctctggagatggggacgttgcgtgtcggaggttccggtcgccctgtgcccgccgtcttctccgctgcagcctcgagacgctccgtaacttcgtcactagacgctgcggcggcttcgatcgcaatctccccgcgtttgacgctagaggtaacgaaattgaaggtcctttgtgagtcgtagagtggacgtttatattcatctctgtgtcgggctactgggtgtttaggcgcacctgagaagccccttccgtcggagagaagagctgtcgaaggtgaggggatcgatcgctgcgtcatagatctacaagattatactcacccggctttctatggatactgtatgttatgttagaccgttgttcgatctcgagatgactcgtccagatcccgtttccaggtgaagaacgtcactgggcctcaccctctcagtgcgcgctcgcctcagattcgtaggacgggaaagaggacgatggagagtgatgttgcaacgcggtcgcacgatacgagaaaaccacgatcgagcgaagttgtggtagctcatgatggtcagagtcagcagcttgagcagaatggggagcagacccagcagcgtgaagaagaggtatcggaagtcgtgcgaacggggcgggaagagctggcatttcaagtcggtgagcgtttgtcagacgtggatgcaacaccgaggagggagtcaccgacgcatttcgaggaagataagcctcattcaaatgaacgcaggaccagtgagcctcgttcaagggcgctacctctacctgctagtagtacattgggcacgttcgtgtctagcacgccgtctttgacgaagctacgaagctcattcacagcccgagagctggcgctatttacgcaccgacaagacaatgcagactccgacgccaagtcacaagcgcggtatcacgtggcttcgcacccacactcgactactgttgctacgccaccagcagcgttagagacaaaccaagagcgcagccgagagaaaccaagtgggcacaaacacacagtatcatcggttacttctcgtcgtgatcccgagcacataccggtggcgagtggaaagcgcaatgtggaatcgccatggacacgagtggacacgtcaatagatcacatctacgaagatcctgcgattgatatggtgcagatgcacttactacacagccatcacactaccagtgggcaaaagaagaggaaaatggtggaacgcgagcgcgttctcagtgctgcgtctgggcttcgtgagcagcagatcgagatgaagcgacagcaggagcagatacaacagcgcaagttgcaagtccagaagatgtcggaggccattcgacagcagaatcaacgagcagttcgagcgagggcggtgcattctgcgggagttaatggtcgccgcccgaaaccaagccaacgatccgacagtgcgcccaattttcccgagcgcaagcctccagtcccacgcttaagtcgcaatggcactaccccgaaacaactgaagcgcaaaaagaaaccgaaggatgactcgaggcttcaaggtgtaagtgcgtccatactgatgggtttgccgtccaattcaagtagagaccttagccgccaagagctggccacggatggagaaggggagggtgcaaaagaagaagaagaagatgacagcgtgatacatgatgaagcttccaacccccctgccaagcagcaaactgctaaacggagacccccagcatcaactccacgtgtgtcgaaaagggagaagcgatctattaagccacctgagaacgacgcagcaatccgatccaaagaagaacggcgagcaatagcgcgcgagtacatgcagctccagaaaaatagccggcgaatctggaatgcgaaagtgaaggagcaatctcaacgcgagcaagaaaagcgtcaacaacaactggaggtgcgatagcttgccattctgatttcgttctgcttgctaaaatctgttgcctctgctacaggtattggaggcgacccgattgaaaaagctacgccttgctaaaaagagggcaaacaatcggaagaagcaagaacttgttgaccccgtgttaccagaagatgatgcaatggttacaatcgccatgtcgatttcgcctcgaagtagcttgactccgtacgacaacgatattgatacgccttcgaaacgtgaaaatatgcagaaggtcaggaggggtgacgaggagatttctttcgatgagcctcacctggacgatgaaaatgaccgcgcaattggaaaccgaaacgtttctgaacgtcgttctacacattttgacgcttcacctttcagaagtgctgaacaagtcaagaacgtggaggtggagcgagacgagaagcgcgttgctcaagccagcgagcgtgttcaaaaattacttgagctacgagaaaaggcagctgcactttcagctcggctaagtggattaaggaagcaacaaggcgcttcaactgaagtgttggcgacagaaccagaatcaaagtcaggtccgagtacgaatgatgtggcaaggtctgctagtgatatccatggctcgaaaaccccaacagatatcccagcggctaacgcggtgaatcagcctgatctgagtacgattcatgtggcaacttcgtctacccgtgatgtccttggctcggaaaccttgccagataacccagcggctaacgcgatggatcggtatggtgcgtctgaaagcggctcagataatggaatcggtgaagacgctgagggggatagaaacactggtaatgagtctggcgatgaatttgatgaccgacgaagtggttcatccgatgttgtcagagagggtcatgatgtaatggaaagccggaatggtagctcagtaagtgaagaaaatgatgattcgcttgatggaagtcacgaggaccaaatatctgaagctgcagcaagcccagttgcgagcagccagcagatcgtccagcagacccgagctttcaatgctgcctcggctacgcttgatgaagacatagatattgacatccgctctatcggtgtgtacaatattggcgttgtgtggccattgaatactgaagagacaacagaagccaagtctgaagcaaagctttcatccgcgccagtccaagcagattcatcaagctcgtcatcttcaggttcatcatcgacaacaaattcgcctaggggcctgcaacggcttctattagctggccagcttgaagaaagccatgatgaatctagggatgactcggaaggagcttttgaggtggcgttttacgagcagctgaaaggcaggctacaaaggccaaccatcgagtcaaaagctgcgccaagtctatcttaccgcgaagaaaggggagaggacgcaatgagtgcttcagaatcggactcggatgtgccatatccccctgctcggacctggcaaagcggcttgtcgccagtgaatggtaccagcccagtgctaatgaaccagtctcgccaacccaatgaaggactgatgaggctgatccgagaaacggatgattccttgagtgtagtcgatcgcgctgctaaagcactataccgacagcaggtcgaacgtttagagcgtgagaaagagaaggagctccagatacgaattgaagcggaaaagaaagcgctcctcgaaaaggatttggcgctgaaagctgtcatggagtccttgactgggaagatcgctagtgatgacgattctggtgtgggtgattcggatgatggtggtggctcacattctgaagacgatgctgctgacgttcaagatgctcagtacaagcggctggaggaaattatggatgaagttgaaagagaacgagcccgagagaacggtgacaatcgtacttcttgcccagatcgcggggtaactcttgatgaacgccagacgacaactcaatcttcagaagaaaatcttcgagaacgaggggggatacctgtttcaacttcgtcttcaatcttctgggaccaattggtctcggattctgctccgcgtgagctcgatggtgaacgtctgaatgttgttcgtccacacgtagcagtcgacgactcggagctcgtggcacaacgagaagcccgccttcgagaggaggacgaacgcaaggctggatacgatagtccgccccgcgtgcactccccgagaaccctctcgaaaatgctgatggctgctgtggactaccaagaggcgatttttgaggctcacatgcagctggcaatgatggagcacgcccacgagttggagacagttcaagcagagactataacgcttgcccaggcttttaaggaagagatggagaacaatgcaaccacgcaccaattggcattgaatcacgctatcttggagaaaaagtttgacgatgacacgcaagatgtgatgcagcagttgactaccattcgggaagcagaggaacaagagcgcgtggctcatgagtcccaattggaacagcagttgaggcaggccaacttgcgggaatgcagcgttcagacagaagcctcgcaacgggcggatgcagctacctctgcagcgttacatgttgatacatccacgtcaccaatccggttcaaatccgatgcggctgtgcaggcctcccctcctgtaaaatcggagcgtggatgtggtggtgccgtcgaagatgatgtagcggcatctgaatatagtgaggagagtgaaaatgacggaggtatcgatatggctgaagtgcaacttgcgaacggagaggaagcgattggtgagaatgcacagggtgaacagtattcctctcagttcgaagattcctcgcgcggcaattcgatgagtgctattccgacaaagagtggggctggcgaaatcccaagtgatcaagaaatcagcgagattgttgctacgtcttctaaccttaatggtaaggatgacaacgcagggattgctgccgtaagtgaagagctacattattcggatgatgctttcgaaagtgggcaagtggaagagactaaagtttcctattcggagcatttgcagcagtctgaaatcggtgacgagggagaagacgttattgttgacgcgcacgaagccagtgacggtaaagcggatagtgaaaactacgaagcggagtatgaaaacgattatgagaatgcatcgttcgatgaagctcaacctgcatctgaggtttactccgaagatgctccagcttctgtcgacgactatcctgaagatgaggtagctcctagtatgggtgaagaagaggaggaaaccattgttgagcacgaggccactgaaggtaaagctgacagtgacaactacgaggctgagtacgaaaacgattatgaaagtgcgtcgttcgacgaagctcaatctgcaacaggtgcgccttcggaagatgcatctcctccgatcgaagaatatcctgatggtgagatagctcctagcgtcggtgaagaagaggaggaagacattattgtcgacgaacatgaaaccagcgaaggcaacgctgaaagtggcaattacgaagatgagtatgagaacgattatgaaaatgcatcgtttgacgaagctcaatcagcaacagacgtaccttcagacgatgtgcgcggttctattgaagaatatcctgaagctgaggtagcccccagcgtcggtgacgaagaggaagaaattattgctgagcacgagaccagcgagggtaaagttgagagcgacaactacgaggctgaatacgaaaacgattatgaaagtgcatcgttcgacgaagctcaatctacagcagacgtaccttcggaagatgcatctcgtccggtcgaagaagatgcggtcgcccctactgttgatgaagaagaggaagaagctattgttgacgagcatcaaaccagtggaggcaaagcggaaaatattaaggacgaagctgagtatgagaacgattatgaggatgcatcgttcgatggagctcaatctgcaacagacgtacctttgggcgatgtgcgcgatcctgtcgaaagacatcccggagatgatgtagttcccagtatcgacgaagaagcagcagaatttattgatgagaaagaagatgaagtcgacacctacgaagctggaactgagaacgactacgagagtgaatcgtttgaagcccaaccgacaacagatttgccctctgaagacgcaccccctcctgatcaggcattgagtgatgctggcgaaaatccatctgaaattggtgacgatatagtgcccagtagtatcgacgaagaagaggaaggcaatgttatcgatgagcaagagacgagtgaagataacgctcgatctgaaggcgacaactacgaagaggagtacgaaaacgactatgaaaatgaatcgttcgatgaagtgcagtccacgacagacgtacctcctgacgatgcgcctggtccactcgaagaatattctgctgaggctggcacggtaggcgaagatgcactcaaaaactctggtcatggcgatgaagacgaagacacaaatgcgtattctgacgaaggcttcgacagcgcatcgggatcgttcgcgagcgaggcacctccacccgccactgcaagccaaagccatgtacctggctctcctcatggctcgaaccttgctgcgtcgacaagtgtaaaggaggaggaacttacacaggcgatagaggttgtggcggggcagattcaagaagatgaacctgcagatgaactgagtattgtacaaggtgatcacaccgcatctgtccgatgtgctgcagaggacagtaagtccatgctcacttcggtgtcaatctccgcttcacacgacggtgaagaggaggtgctagcgaagagtattgaagagcgaatggcccggcttgaggcgctaaggcagaaaattgcagaccgtaagggcgaaatccttggcgtgcagaagcaaatgcgcgttgagaagcgcagagagcaggttgtagcggaagaaaaactgctgtgggatgaaatggaggctgtcgagaagcttctgcgtgctgacgaggcagcgttggctctgtgcagacagaggaatcggttggagataatgaaccttgaagctagacaactgactcacgctgctcgtaccgaaaacggagtgggaaatgaacgaccgattgatttactgtctggttttgactatgtcgaggaggcatgcgtggatgaggtgcaaaagcgctcgctacgcgagacaatgatggctcgctcgagagcggtgagagggtttgatttgctggagggatacgtttatatcgaagacgttgagccagtgaaatgccacaccgatgagcacatacttcctgctcctgcacccagcatagccgaacctgacggtgttgaggaaatgttgagtggagtgaatagtgattctactggaagcgacgatgctgatagtgggtccgaaaatggggaccaaggtcaagcgcaagatatggctgaatctgaggattctatgctggagggggtcgtttctgatttacttaatggttacaactacgtagaagatgcggatccggttgatcgcgacaccaatgtgtccgcatcacccgctgctgtgcctagtgtggaagcacccgatgatgaatatgaaggtaaaggtgaaagtggaagtgaagcgaatactgtcgctgttgcaagcgacgctgctggcaatggacccgaattttgtgaccctagtcaagatgtggctttgaacgaggactctgtgagggaacagacccttctcgatttacttgatgactgcaactacgtcgaagacgttgagccagttgattgcgacgttgatgagcccatagtgtccactgctgtacctcgtaaaactgaattcgattgcgaaagcgaagcgacatgtggagacgctgaacccgacgagcaagtcgttgagccttccgttgaagaatcatcaaatggaccacctgaagcaacgcctcgagaggacaatgagcacgacagagcagcggaaagtgaacgaatgacggacgaagtctttgcgagcatttttgacgatattatcaactcagagttgcaaatttggtcacgctgtcgtcttgcgcacagtacttccagtcgtgaagaaagtgtcactatatccacagccatcgccacagtaaaacttcgaaactccgtcgagcctgtgaagcaagtggccgacgaagcgacaaaagagagggccttgaatccaacgcaagaattggaggaacgactagagactgtgaatgatgaggtacgtttacaaaagaggcgcctttataactttattctgtggtgtttagctaacttttcgcggtttcaaatgtgctgcaaacagcttcgttttcctgcgttgccagatgatctcattccgcaggatgccgtaaccgaacctagtgagcttccagtgatccgggagcagtctgagcgtgaactggagcagcaagtgcagctgcttccagatgaagctagcgctgaagatctccgtggtgatgtgttggtatcgcaaaactgcagcacgtctaacgtgggcaacatcgtctccgaggtgcaatccgagcttcatgatgtggctgtcagcgagcgctttgggagggaacaggtccctatcgatttacttgaagagtacaactatgtcgaggacgcagaaccagctgattgcgatgttgatgagcccatggtgtccattgctgtaccgcgtaagactgaacctgacgacgaagtgacaattttatatgaagacgctgaggctgatgaacagaccattttgccaatagctgaagaattgccaagtgcatcacccgaagcaacacctggaggggacaacgagctcgacagcgcagcagaaagtgaacgaatgacggacgaaatctttgctagcattttcgacgataccatcaactcggagttgcggatttggtcacgccgtagactggcagcgtcatcccaaagaagcccacaacgctcagttacaagcaccaatgcatccacaaccaccaccactgcaagagttggaaactccccaaaaactaagaagcgagtagccgatgaggcgtcgaaagggagggatctcaatgcaacgcaacaattggtggagcgactcgagattgtgaatggcgaggtatgcttacgtgctttcgattggtattctgttgtcgtttttaactaattttttgtggatgttactcttctgaatagctccgtcttccagcattgcaagagatcacaaaggcgtcagcttcgcccgctgcccgtgtactctatgacactgtcgagacgcttgcccaggactgtttcaatgcgatccagcagactgcaaccggtgaggtcccgctggaccagacgtcagtgctccaagtcattcagcagcacgtcgaaaccgaagtcagggagctcctagcgatccgagagcagtccgagcgtgaactggagcgacaagtgcagctgctttccgatgagactggcgctgaaggcctcaacagcgacgtgttgctatcgcagaactgcatcgcgtctaacgtgagcagcatcgtctccaaggtgcaatcggatctgagcagaaccaccgaggacctgtctactgcagctcaaccctctcggtcgggaatattctcgcgcacaccagtctcccgtgccagaagcacctctatcctctcttccttacagacccagcaagaccaagagctgcagcagagactcacgggcttgatactcagcgacctgctgcacgacgccggtctgccttgaagttacagttgccttttttgacgtgcgtccaccgaaatgggtacagatacccccagactttatagatttgttcataactgtaaaaacacatatctacatcagccatccgttgtcacaagtgtagccaagtccgagtcgaagagctctgttagaccccatgagctctcctgctgtagtgacgaggctgctggagtggctcgaggcccatggagcagccgacagtttgctggacatccggtacttgggcaagctcgaaggtcacggcgtgttcgccaagcgcgcgctgaccagcggccaagtgacgctgcaggtgccgttcaagctcaccatgaacaccgagtccgccgccacgtcggacttggcgcccgtgctcgagaagtacccgcagatcccggacgacgaggtgctggcgctgcatttgatgcacgagcgcagcaaagggggcgagtcgttctttgcgccgttcatcgcgtcgatgcccacgacgttcgacttgcccgtcttctggacggaggcggagctcaacgagctcaagggcaccaacgtgctgctgctgacgcagctgatgaagcagcacctggagagggacttcgagaacatccaccaggccgtggcggcggatttccccgacattttcgcgtccctgccgacgttgacgatcgacgattacatgtgggccatgagcgtgatctggagccgcgcgttcggcgtgagcaagggcggcaagtaccttcacgtgctgtgtccagcgatggacatgttcaaccacgacgtgactgtgcgcaagccgctggatgacttcgtttcgttcaacgaggagaagcagatgatgacgcaccatgtcccggaagacgtggccgctggctccgccgtgcacatcagctacggccagtactcgaatgcgaagctgctgtattcgtacgggttcgtctcgcccgaaaacttccgtcgtggtgtggacttctggatgaagatcccgctgtccgatccgtatttcaagctgaagcagactgtcctcgactcgaacgagctcacgaaggagcagacatacgacttccacggaacgctgcttagcaatgatgttgatgaaaggctgctggctacgctgcgcgttatcctgatgaacgaacaggaaatccgtcagtacaagaaggtaagcctcagtcgcctattgctttcatgtgcagctccggtaactaaccgtttctctctcttttactaccgttccaggctttcgagtcttcaattcttagcgttcgtaatgagctggcagtgtacgaaaatctgcagagcacgtgtcgtcgcaagctctcgaactacgctacaacgtacgttgattctcatttcatgctttcagtcttgtccgattttccccataaaattgacgcatctgcttgatcgtgtatgctgccacaacagacttgaagaggacgaggcgattctggcagaaacggagaccgaatcgaagccacgattggcattcgcagttcgggtgcgtatggaggacaagcaggtgaccaccagcgtgatcgagacgctcgagcagtggaagcaatcgcttgcctcgaagcctgacgcgtatccgccgagcactacgcgatccaaaaacactcaataacagacttgtgtaaacagttttgtttgtgtattttgtcggtcttccgcttcctatggtcccttccaactgctacaattttaaggcacttgggagtagcctgggaacatcaatgagaaacgctacggcagctcggagtgcaggcttccttgcctctttcggttaaaaattagttggtgagcttgcggtcgagcagctgacgcagcacgctgggagtgaagtagggcagtctcgcgttcacttcgtcgtcgttgaggtacttggcgccgccaatgtgtccgcggcagttgggcgcaccgcacccgcagtcgaacttctcgtccatgtcccactcgctcgtcgagtagtcgaacgtcaagtgttcgcccttctcaatgggcttgatcgccacgaacgacaccatcgcctcgctctcggacatgtcgatgcgcgtgttggggttgcagctgtggttgacaaactcgagtccgcccgtgaagtccatgtgcttgtcgggcgtgatctggaccgtgaaccgcgtcggcttcgagtactgaacggcatcaggcaggtaaaaagtgagttatcatgcgcatctcgcggtctaacccaagcgtacaatcgacgtaccaagttgccgggggccgagccgatcacgtcgtccttcttgaagttctgacctgccaccgccgagcgccagtgctcgttcctacatgaatccaatgcaacgtccgagtttagtgttagataggatttcgtggcactgagcaggcagacaactcaacgtacagctgctcgatgtagaagcgtccgtcggagcccgagggcacgtagctgagctggccgctctgctgcgcctcgtgtccgtggccgttgaccttcacgcgcttggcgctggccgaaggcgaggcagcggcaaagtgacggcggctgatgcgcgctgcggagcgcgaggccagaggaatgttgcgcgtcaacatggtgcagagggagatggagggggcgaaggtggagacttgtgcgactttcgaggcgaattcgactatgggacgatcaggaaatgacctcgagggagcgcattgcactgcaatcgtgacgaaggcgcggccacatgctcgttcctgcccgccgcggaggaaggaggtcgttgcgtttcgagtcgcgatcgtcagataaggctgctgaactggcacatgtgggcttcagtatgtcgcaagtaaaacgagggctagggccaaaagttgaacttcagcctgaaaccgtcgcacttcaacctgcttcagcctgcaggaagatcttggatccatccccccctattagacgatgacgttgacatacagaggagagcgctgctgggctgtggtttgcttgggtcaacctgctccctgcagcgctatggatgctgtaccgacttctgtgcgtccactgttttactaaaataatttttcggcccgaggatgccttagccgcgaggaaggtggcgtcaaattcacgtcggaaccaacaccgagcccggcatcaggtacatgtattataacttatacagcctgaagccgtttataagagtgatcgtacgcgcacatgtattacactgtaggatcgacgaatcgaggcccgtacagttgtcctccgcctttggtcaagtctgagtcatttgggaccgcgcctcctgaaggccaaccaccgtgttaaccaaggttcatggtccatgagtgaacagtaccggtaggtcctctttgtcccccgatcgtctgtgctgacttgcagcgagacgacggggttagacttcacgtggaaccggctgggttagcaagggaagagcggttgacagctccagctacgagcacgtcagtgcgtgcacttacctgtgccccacctcccatacagaatggctctacgccacgccagacaaacgtctcccgcgggccgcggcacttcgccggtcgacaatatttaaacccaaatattgcaattactaacgcgaatattgcaaatccaactcggacaatttccgattccaacttcccaatcggggatcatgaccacgctggcgtcgctcaagacgtgctcgctcgaggagctcaggaaggagccgtggcggctgcagatccaggcggacaacacggcggagcagctgcgcgacctcgtgctcaagaactaccacgtcttcatccagagcaaccagtgcgcggccatcgtcaaggacgacctggccgagctccagagcgacacgaccgaggtcgagacggccatcccggagctgcagcgccactgcgccaccttccagcgggacgtggcggacgtcgtggccaagcacggcgacatccagttcgtcttcgagcactacctgcagctaacggagctgctggagatcccgcagctgctcgaggcctgcatccacaacgagctcttcgactcggcgctggacgtgatccagttcgccaacgagacgttccaggctggagaaggtgaaggcaatggagctgaccctgacgcggaggcgtcacgcaacctcgtgatcgactgcctcgtgcgcgaagtggccgagatgaccagcatcatgagggacaagctgctgcagaagctgcgcgaggacctgcagctcgcgctgtgcgtgcgcattgtggggtatctgcgtcgactggacgcgctggtggagaaggacgcggcggcggcggtggggtcgctggagtacgagaagcaactgaaggaggagttcctcgcctgcaggaacgtgtggctctcgtccttgagcagaggcattccgtcctccgacccgtaccaatatgtgcgtgcctgattttttgggagagtgtgggtggtgtttgatcgggttttctgacgagttggtggtgctgtagattattcaagtgatcgacatcaagcgaacgagctggtttgatatgattactcaatactcggcgatcttcggcagcgaggtaacttgcattgggtgaagtatgctgttatgcaataatgagggcctaacagtgtttgttgttgtgataactggtgctattgcagaacgtagatggtaaggtggatcctccgctgtgtcgctgggcaacatcgacggttgcaaactttatccacattctcatgaagtacgttgatagtttgattttttcttgcagtcatagttgcagcctgcgctggacgtctaactaaccttaacctactttgctgtggccaggcaactccccaagattgatgacttcagctcgatcgctacaatcctcgaacagagtctgttcttcggagggtcgctaggtcgtgttggtgtggacttccgagctgtccttgtggtatacttcgaggaccacgtactaaacttgatgactgagtactggcgagcggcttgccgcgagttccaagaaaacctgagcgctcattcgctgtcggcgtccagtgggtcgtccttttcggcctcctcgaagactcccatcgtgatcgcgtcgtaccgctcgtcggcgaatggaagtggcaacagtttcccgttcggttctcgcccgactgctacatcatccgacggggaagattactcaccgccgcggtgtctgatgtcgttcccattgctggcagagttcacgaacgcgctgctatcgtccctcaacgagttgagactgtgcgcaatctcgtcactgcagaatcgtcttggtaaaaagtatcagagcgcaatcggcaccatgctgcttacgatcgccgacttcgtccaggagaacgggctggatctgcacgctccgaccgaagaaggcagtgaaagtgtctcgaggaatgcaagggcagcgacacttaccgaatcggttcgagcaatgaatgaggtgatgggattgctggtgtttgtatgccaccgtctcctatcactaacgttattgtgttatgcttgcaggtaattcgttcggagcttgtgccgtacctaatcaagtgcttccatcgcttgttcccggttccatcggcggctgctcttggcgcagccaacgctgtgagcaaggaaattgaatcttttggcgaaatcatgcgcgaggccggcttgctggcccctccaccagctgacgagactggtgcaaaagtcgaagtggatgtaaacgctggcgtattggagacagcaccattcgacactgatgctgctgtctctgaaacaaccgagtagaaatgaccaaacatgcgggtagctagctgtccgtcagtaaagtttatccctcttatcgagtatctaaagctcgacatggctacctctacatgtggacaattcatctttcgttgtagttcttcagttcgagtttgcgcttgtgctcgtccaccttttccttaacaacgcggtcgacaagcttcggcgtcacgacaacttcgtcctgcgcgtacacgatgctctgcatgtacagcatcatcttagcgatttctcgaccgctcatgccagtcgtcatctctccatactgcgtcatgacactcgcgtcaagtactggaggcaacgcgctgactgacgccttgtcgggtttgcccttgcaatcggtggcggcaggcgacacagctagaggagcgacgtactcgttaaagtacatttgcagcagtcgcacgcgctccttggtctcgggcagatcgaagtggagcgtgtcgtcgatgcggtcagtcacagcagtgtcaaggtcttcaggccgattcgtggccacgaccagcatgaacttcttggactgtgtgcctgtgtggtacagcagcgcgttcaatgcattgcgcatcgcttcgctcatgtgcgtcttacgtgtggctcgacagccgaggaaggcctcagcttcgtcaatgaagatcaaaacgccgcgaggagacgagttcgtccacttaaagagagcgtggagctctgtaactgcatcggagcccagaggacccacgtcaccaccactcaagatggcgtagtccatgcctgaagctcgagctaaccgcttggcaaccatggttttaccagttccgggaggtccgtacagcagtaagtggcggtatggagccccgtgcagcatcgcattgcgcgtagacctcgcgatctcgaagacgcgcgtctccagagcgttgcgcagcaccacgtcggccagttcgtcttgtcctttggctgcattccgacggaatagagctttgaggaagccaaacgctccagcggatcgagaagtttcacgcacgagcgagggcttcccaaggcgctgctcgattagcttgccgatgatacgaatggcttctctgctgagataaattccggctgccagagccacgaagcctccgacgaacttggtgagcttctgcttgtccgccagcagcacggagataccttgccccaaattgtcgaacgtggactgcagcgcctgcatgagcttgacacggtcggcttcaagtctctgctgcagctgagccatctcaatgtcttgattagcacgctgctgtcgaatccgcccttctacgtcgatcgccgccttctctagcgttgtattgcgctccagcaaagcccgcgcgtggtctgccgcaagctgcttctccttcagcacctcctccgtctcccgcctcgtgcgttcaatgcgaatgttcgactcctcctggagctgaaccaggtcgcggttctgatctcgacgcgcaacgtcctcctcctgcatccgcttctgctccaacgcgtgcttctcgttctccacctgcagctcgtggtcgcgcttccggtcgagcgtcttgcgctcctccttcccacgcacacgcgcctcctctatcattttctccgctttggcaacttccgcctccgcgatcagccgcttttggaccagttgctcgctcgcctcttgctccagatacccctgcagctcgtcgatcttctgctgctggactcccgtgagctgtcggagctgtagaatctcctcctgctgggctcgtagattgagaataagctgctgagtggcccccaagttgtgcatgtagagcgcatccttgtccacgacgtggaagtcttgcaatgcgatcttaccgcggccgtcacggccgaacacgaagcgctccggtagaatctgcaccacttcgggcgccaccgtccggagctcgggcccgaggacgcctagctgcgtagaacgccctaccactgtgtcgtacttgaactcgtaccgcttgagcgacaacttgctgagcagctccagactttcggacaagttggcggcctccacgttctgcagcgcgtccttgtactgctccaccgtcacgttggccgtgaagccgccgccgcgcctggaattccggtacggacctcgacttgctggcaccggagacgtcagcgctgcaatcgctaggcagacgagcagaaggcgcgaccaggagaatccatgcagcggcattcgtccaggtggaacggaggaaggcggaatcgctgagctggtcaagaggctgtgagctagtgatcccatgacccttcgtgaaaagatacttttatatcaacctagccctatttcaacagttttgctctacttttggatacatttgatacaggagcgatgaagggctccttcaaaagaaggcggggctctgcagctgcgatataacttgatagcattgtagtgcgtgtttatcccgtaggtaatactacgttctcgtgccatgtgttttcatcacttcccggttccatcggcggcactgaagcaaaagctgaagtggattagaaactgaagtattggctccaacaccgatactgctgctgctgccgccggaacaaccgattagagctttcaaagatgggggtaaaagaaacccaacaagatttcactgcgttagctgtcatagtatgcctgatgttcaagctgatgaaccggtttcacaaatctacacctgtacctacgattcaaggaaaatttatgcgcataccgtcgtagggcatctcgatgtgaagccccttttcatcaccgatctccttcaccagtatgccgtatgtgaagtaatctagctcgtggttcatgccagtgagttgggccggattgtctcaatctccttcactacctgcatcaggttcatgtgggcgctgttgcgcttgtccagatacaacgcgtcgatcattagtatgtcaatgggcggcttgctggtgtcgttgaggtatacccgcgtttcctctggaaattcgctcacgtccgatatgtagacgaacctagtgtcaaattcgtggccaaactcgaagccgagtgaggtgtatccagcaccgtggatgacaggaatgggcagaaattctatgccacaagcctcaaatggtacccatggctcgaaaacttccagtcgaagtgtagaagtctcctcctggatgagatacgggaatttcgcccttacatcgcgacttgtatcttcgcagcagtgaactttcatcgaattaggtggagttttgtacatctcctgcgtctccgagtccacagtctcctctaaagactgtacctcttgcaagtcgtccaagcccaggcacgcgtcagcatgatcgtgagtaagcaccaccgagtgcactgcggacacgccgatcttggggaagatacgcagcgcagcttctcggaaagttttaccgcagtcgacgagtacgttggcgttggtctggaggttgcggatgaggagactggggttgagccgtcggttcttggagtccggattcgcttgagcctctcgacagatatagcagcccttgccaagaagacagcgcatagatggcgaggaagatgaagtgccgcagccgaggatcacgacgtccataatgacgcctgctcggaagggctcaaaaggcgaaatgcggggagacaagagccacgtttgatcaactgagtggcggctggtcaagcaagataccgggtcagccccaccattatgaattagactgattcttagtgcagcctttcaatagagcaattggctgagtacttcgtaattcgtgttaatgatagcctgacggacactgtggcgcccacgctaacactgatcgagtctatattgcgtcgtacgttcaagggaaggcgatacgtagaccgtcgtaagtcatctcgatgttcaggcccttctcctcgcccattttcggcaactcaacgctgtgcttggggtagtcgaagtcatgactcatacccgttagcaatgttcgcttgggctggatggtttcgatctcctccatcaccttctgcaagttcatgtgcgtgctgtggtacttctccaggtacagcgcgtcgatcagcaggacgtcgatcgggggcttgctcttgtcgttcaggaacgctcgcgtgtcgtccgggatctcgctcacatctgagatgtagacgaatcttgcgccaacttcgtagccaaactcgaacccgaacgacgtgtacccggcgccgtgaatgaccgggaacgggaggaacttgatgccactcgcctcgaacggctcccatgggttgaacgcgtcaatttgaagcttggcggtccatcggaacggcttgggcgctgcctctccagcgggcggggctggttcgttgtcgatcaagtacgggaacttggcaattacctcgtgactcgtgggctcactgcagtgcaccttcatggcctcgggtgggatcttgtacagctccttggtcacggggtcgacagtctccacgtgggcttgaacctctctcaggtcgtccatacccagcaacgcatcggcgtggtcgtgggtgagcaccagcgagtggacagccgataccccgatcttggggaagatccgcagcgctgcttcacggaaggtcttgccacagtcgacgagcacgttggtgtcggtcttgaggttccggacgagcagacttgggttgaggcggcggttcttcgagtccggattggtgtgcgcctccaggcacacgacgcagttctgattcagcacgcagcgcatcgacggcaccgacgacgacggcccacagccgagcaccaccacctccatcgtgaagtagggcagacgcgggggtgaaaggggagtgatcgaggactgcgctgacgcagatgagagacctggttggctaatgcgctcccatgagaacgaccctctttcgtgcataaaactcgtccgttacctggggcgttatggaggagaatgctggtcgaagtaaaacagtaataccggtactttcttgctgcaatacagtactcatctggaagaacgtcaggagcttggattgaattgtttgaggtttgctttaggctagctgctcagcccttgccgcgatggcaccgtatcccagtacaggtattaaaacatgtagcatcgccagttgcaatagtctccggtcggtcgaaacacagagtatcacgggaacattcaggcgcatgccgtcaaaggtcatcgcaataagcaagctaccctctccacccattgtcgccacgacggggtggcagtcgaattcgtgactcagcagcgtgaagtcctgaagaacggcaaaagccagcaactcaactgagttgggtgacccaacttgggtcaacgccagcggtgactcttgctctaacaggtatgaaacctgtattgcctgtataaaccagcttgtatctcggctgtagtgcatcttcttgggtcgagtattccttgcacagctcgttcgacttcggatcgaaggcagcacctctcacaagtcgtccaagccctttttgctgcagtcaacaagtacgttgcagactatgtacctgtagtctcgagtgagttggcatcggacataagaatcggaggaggacgtcccgcatccgaggacgatgatcttcatgcagacgaacaacggagctcgtggcgagcttctagcgacgcagttttggacagagaaatgcatgaattgcaaacgtaccacaaatttggcactgtagttgaagctggggtccgcttcgtttgattgacacgtcgtcaatgagctccgataaccacaatcgcactcttctggcggtggagacgccttgatgcctctttctgccacgtgtgcggaagctgccagctgcgagtcttccagaagctgtgcgccgacttgttgtccggacggcactgtaacctactgtagcaactacacactgtactgtagccacttttagtcgcaattgcaagtctctccgctgttcccccattctagcactgcaatgctgccgtcgcagaacggcaccatgacgttcttctttaccgctgcaataattgttgctgttcgtaagataagataccttaagtaaggtaattcctcgactgagttgggcgggcgccttcaggttttctacgggtcgactagcgcgctgcaggcaagtcgacgcagccaagtcgtgcccgcagccttctccgatcgcagcaggcggttgaccagcattgcaaatcgctgtcgcgagcttgacggccgaccgccggttcgcgctgtcgtcctgccacgtggagtgttgccctcagctaagtacgaatcaacttggtgggctacgtggctgcagctcctgcccggcactgctgccacgcaatggaaatgtgaatatgtggcattgaggtcgataggcccgcaaccacgcgctcggtccggcccgtttcgagcgaaattcgagcggtgttgcccctcgtccgactcacagtcaactgatctctccaccgcaacgtgtcgatcgctcggacatatcttcgcacttaggcggggtctccgacgacgcgtggcagtcgttcacttgggtttcgtatggggcatacaaactcgcctagttctgggcgggtttttctagaagacccgttttgtcggaacccgcgcccggccacgtcagcagtggcggctcactgggagtttgtatgcgggcctgtattgaggcggccgacccgcccacgatctttgacttccacgcgttgcacctgcacccgccccagtcattatcgttttcgcagctaagcgcagagaaggatgaacctctccaagatcctgctcatggcggcggcggccttcgccggcgccgtaacggccgacgacgcgtccaagggcccgcgcggccccgtgatcggcattgacctgggcacgacctactcgtgcgtgggcatctacaaggaccagaaggtcgagatcattgccaacgaccagggcaaccgtatcacaccctcgtacgtcgcctgggactcgaacgacgagcgcctgatcggtgacggcgccaagaaccaggccacgatcaacccggagaagacgctgttcgacgtcaagcgtctcatcggccgcaagtacaacgacaagtcggtgcaggccgacaagaagctgctgccctacgagctcgtgaacaaggatggcaagcccttcatccaggtggaggtcaagggcgagaagcgccagttcgcccccgaggaggtctcggccatggtgctcaccaagatgaagcagatttcggagggctacatcggccgcgaggtgtacgacgccgtcgtgacggtgcccgcctacttcaacgacgcccagcgtcaggccaccaaggatgccggtaccattgccggcctcacggtgcagcgtatcatcaacgagcccacggccgccgccattgcctacggcattgacaagaagtcgcagggcgagaagaacgtgctggtcttcgacctgggtggaggtaccttcgatgtgaccctgctggccatcgacggcggtgtgttcgaggtgctggccaccaacggtgacacccacctgggcggtgaggacttcgaccagcgtatcatgcagtacttcatcaagaagtggaagaaggacaagaacctcgatgtcgcctcggacaagcgcgccctgcagaagctccgccgtgaggccgagcgtgtcaagcgtgccctgtcggcccaggcccaggctcgtcttgagatcgagtcgctgctggatggcgaggacttcacggagtccctgagccgcgcccgtttcgagaagctcaacgaggacctgttcaagaagacgctcggccccgtcgagaaggtgatgaaggacgccgacctcaagaagtcggaggtcgatgagattgtgttggtgggcggttccacccgtatccccaaggtgcagcagctgatcaaggactacttcaacggcaaggagccctcgcgcggtgtgaaccccgatgaggccgtcgcctacggtgctgccgtgcagggcggcatcctgagtggcgagcaggacgacctgaccaaggacgtgcttctgatcgatgtggtgcctctgtctcagggtattgagaccgtgggcggtgtcatgaccaagctgatcaaccgtaacactgtgatcccgaccaagaagtcgcagaccttctcgacgtaccaggacaaccagcccgctgtgctgatccaggtgttcgagggtgagcgtgccatgaccaaggacaaccgtcttctgggcaagttcgagctgactggcctgccgcctgctccgcgtggcgtgccccagattgaggtgacgtttgagatcgacgccaacggtatcctgcaggtgtccgctgaggacaagggcacgggcaaggccgagacgatcacgatcactgccgagaagggccgtctgtcccaggaggagatcgaccgcatggtccaggaggccgctgagttcgccgacgaggacaagaaggtcaaggaccgcatcgacggccgcaacgctctggagggctacctgtacagcctgaagaacaacgtcgaggagaagctcgaggacaagatcgacgaggacgacaaggacaccgttctgaccgccgtgcaggacgccatggactggctcgaggacaaccaggaggccgacaaggaggacttcgaggccaagcagaaggaggtcgagaagctcgtcaaccccatcatgtccaaggtctaccagggcggcgccgccccggagggcgacgaggacaacgacgacgaggaggaggacgacgaccacgacgagctgtagacgaacagcccgaatcgcgtaaatgcatttggaagtttgttgtctccgttatttgacttaagtaaggtgatttttccttcagtttttaggctttgccttgtgtttgctttcgcttcggttagtcggagttgcagctaaaccccgagcggccagtcatcaatggatacgtagccggtttaacatcagcaacttcgacgtgatgactggcgtccagcttccgtttcgacgagctccgatatgctacagctacagctggaagttgtggacacacgcccacgggggcgatctcgcgacggtcgaagtacccaagcagcgaaatgacttggatgttcggggcttgcgtgcggacaactcgaccgagagtaaaggcaatggaagtggggtcagacaccgatagtgctcggccagtggacgttggacgacgactgcgctgcaactgctacaaatgacgcgcctggtgtaacgaccgagccggcaagggctccatcttcagctactgcagtgctgtgttcatcccaaccatcgaggttggtggtacacagtgcacaccacacgccacgagctctgggttcaccgcgcgctcgaactttcaagaagacgggcagcccgaggtgcagattcggtctagcaacatccgcttattgctctaaaatgcttggagagcggcgtcgtgatgactggcggggagcttagagaccgaattcccgaagacaaccatgtggccgtcaaagatcaaagatcggcattacaacttcaacaatgcgccaccaactcgaaaaaatcgtcaaggcaggatatgtatcagcaactctgggcagccaaaggaccgtcgaaaaaggtgcgacttgcctcgtcgctcggaggccgtaaactagcggtgtcagacactggcgaaatcgatcaggccccgggcatcaagccagcggaagcaccaggcatccggagccgtcgacactgggcggtgcactccagctccggttgcttctcctatgggtgccaccacctcggctcgctgagctcctgggaggagacgaacgggatgcgtcaacatggcgtcggtggtctcctgcgtcttcactcctgaatttgcagagcgcccgacatcgccccccaatcgacagaccacgtcgacaccaccggtccccatgacggagagctactacatgggcagcagctgccgcggcagcatccagagctgcgacttccagagcagcaacaacagcgcggcctcgcccgtgtcggcgcgcaacgcgctgctgtctgagtcttccatcaacgccctcgtgaccgaccgcgagctcttcactaccgcagcaagtgtcgtgcccaagctccgagccgttgtggagcgccgcaaggacactggccgcagcagcagcgtgtggcgaatgacaccggccgagagacagcatccgccatgctgggtcgtcaagaagaagcagcacggcgccgagatcagtgagttcgaccgagccaaactaccatcggcaagaagcacggacggccccaattggtttcgcggcacgacgagggccaccgacgctcgccactcgatgattgagtctcgtgggtcgctctacactcgcgacgccttcatgggagagcacacgcactccgaagtgcgcgccagggagctggtgcgatggcctctgaacgacctcaacgtcacatacgctgtatcggcccacgtcacactaagctgccgactggacgaggccatgacgatgctgttcagccgcgactcactgcagttcgactcgagcatgggggcgctgttcggcgcgcggaagctcaagagcggcgacttgttcgtatcgcgcgagttccgcaagagcatgaggactgtgatggcgatggagtcggagaacgcgccgtgctgggaagacgacgacctgaacgacctctctcaacccggttgggtcgcgttgcagtccgtggtgctccgttctcgtcggtcgctgaatcccatggcagcagcgaagcataccagccgccgccagagactctgcttcgctgcgtattcgcagtactgccccgacacgaacgaggcgttctacaccatgaagaccctgtccaagcccatgcacgacaagttcactcgtcgcagagacgaccgcgcttcggaccaagcgattcgaggcgacttggaccacatcgccgctgggtatcacctcgctagctcatacagtgatttgagcggacaccagacgcgtatcgtaatgactgcgtacgtctccagcccaccagcagcgacagttcagccacgcgctaagttctgggggagggatcaacatggggcttccgctcgacggtacgctcatccgatcgccaatgcagaggcaaagtatgtggtgaatctgctagcggcggcgacgacatcgttcgagcagcttgtgcgccgccgccgtttgggctaccagccattccggcacatacccgtggcacgcgatgaggacgaagaccattgctgcagtgtgtgcctcaagcgcttcgggttgctgcgtccacaacggttctgccagctttgcgcgcaccgagtctgtcgcgaatgctcaagaaagtttgacgtggagcctgtggcacgcagagtgcgtcgcagccgcatttgcttcgcgtgtgtggccaacgtagacgccagcgtcttccaacaagacaacccgctcttgaatgcttcgttttcgaggacctcgacggcggcaacggctgggatcagaaccagcaacgacgagcgtggcagtgccgccagcgtgaagatatccaccgccttctacgacatcttgctgagaagcgacgaagacagtcgcagcactcaatccgcccgcgtggaggagcaagggtcaagaacaaggcagacgtcattcgctccacgtgcaaagcggctgaatcgcagcagcagcgccgccactgcctcaacttccttctcctcgactccaggccgacaactcgctgacgcgctgttttccagtgacccgctgactcgtgcacgagcactcgaggtcgtacgacaagtggtgaagcaagtgacgtccgactcagcaccaccaagctcagcttctacagcttcgtcttcgtcgacgttcaacgcgtccgtcccgatcctccacccgcagcatccggacaaggaaatggtggaccggtacttagaggcgcgacttcacctctccagcatctcgatgagtggcggcagcatcggtgcagacagcagcaatagccacatgccgcgtgcgcgttccagctctctctacagccgacaagacatcgcgcagcgccgccgacgcagcactagcggctattcttcttccgtaaggtacgaccagagcagcagaccgtcaatggtgccgcgtccgtggaataccagcgccaacctggagacggagctcgacttggacgacggcttggactctgcagccttggactcgatctgcgaggtcgcagcgctgcgcatgcgctgctcgatcgcctacatcgtcgcgctaaacggcgcccacagctctcaagcccaacgcgtcgtcgggtcctctggtgctccgcatccatggccagaggagatgattgtgtgtccgtccccactcgtggccaacggcaagcccttcgtggtcaaggaccccacgcgcgacccgcagctccggcatctgcgacttgcgcgcgacatcggcgtgcgcttcttcgccgggttccccatcaagtcgcccgacggggccgtcgttgcctgcctgtgcacggtcgacgcccaggccagggacaaaatctcgctgggggacctccgagccatgcacgcgctctccaagctcgcctccgacatgttcgaggaggaggtgaacccgtacactccgcgcagcaccaaccaacgcggttgatgactctcccacttcaacgcgatgcacttaaccgttacacactaaccatgcacttcaacatgatgttcttaacagccacgacagatccccacattgttataactcaatgtaccacttcaatgctgcagttctctgtgttctgcacccaacgaagagctccggagccatgcggatgcggctgatcacgcgccttacgcgcgccccggcgcgctccaaggtggcgcccacatcggcagtcgagcatctgcctgttgtcaagcccaaggaggctgcgtacggcaatgggacggcctgggtcgtaacggggtacaatcaagtgtacccattacatgaagagtgacgggtgtcactctcccgggtacatggtacatggtaccagtatctccgcaagccaaccatttgagttgttcacaggtcgaagcacaccttctacgagcccgagcccgtctacttcaaaagtgggctccccctaaaacgagagccaaaagtcgcacaaaatgggctccctcatggcaagtgcgagatcaaggagccctggttcgggctccccattggctccccaccagggccccccaaatttagtttcgaacctatgacgggctcttcatagtaataactgattggccaattttacctagacttaaggcgagcaacttcgcgtgatcgatgcgccacgctagaagatcgagctcaaagatcgccacactagaagatctcgcgccgctcatatgtgtacagccgctccgaggccaccccagcgtcgccggtagtccttccttcccctcaaggagaagccctctttcctatgccttttcaggttagaacctggagatacttcaatgacggccaatcatcagcgagatatttaacacaggtgagggggagcccttaacgagggctcacagttctggagggctcctttcacttaacctattgaactcaagagcccaggagcccgagctcgcgactttttgggctcggctctccccagggctcgtagaaggtgtgggtcgaagagctgtgcttggccggcagaaatttttgtaacttaccgaaaccgggtacctttctagccaaaatatagtacttgttaacctaaccgattacatttaaagctacgaatggctacatgtattactctgtagctcaaagtttagcactaaaatcaaggacaagtctaagataagactaaaaattattgccgcttgcaaatactttgtcctctaaaatagacctctaaaatagaccacgcctgtctcttactatgagtggacacgagataggcgagggctgttttagctttgtgctttggtgaaggccgcttttaggcccagaaactcggtttggtccgtctagaatggcatgtctgcgtttccaagccgcagaaaagcgttttggtcgggaaaacagagccccaagcttgcatgttagaccagtactggcgatatatataaatcagacctaggtcttaattaagagctggctggattaaaatcgagattattgacgagacaataagcatgcgttgcccaaaatatctgcaaacagcaatacgagttattactacaggggcggagaaaccccgagctacctgtgcgggtcagtatactaagactaagtcaaaaagatgtgcaagtgaaatgacaacagcgcttcaactcacaaaattgccatttcttcttggtttcgcatgaatcattcaccattcgacgcggcatcgtttgaactataatctgctcgaattccattggctattaaaggctggattttgtcgaatcgccgctcgaatgaaaccggtccaatctgagtttatcttggcttttgtattggatcaccagatggcgaacctccaacgcctggcaaaacgtgatgaatgccctcagacattgcacgatatcatatccgtttcttggtttctcgggatcctggtttgcttatatggatgacaacatgagtacctttcgcctcatgtgtgcattgtatcgctaatgttgctggatgcaactgggtaggtcgaaacactgggccatcgggcttgcaaatcgttttgacttactatacgtatgtggcgggattggggtgggctatgccttttatgaaaggttgctaaggatttcacaaataaactacgctatgcatccgctgaagcatactttatcgctgggcaacgcttgtcaatatctcgtgctatcatgtctgctagctcgagcaacgtaagctgtacgcctcaaatgttgaaagcgtagaacatcgtctcacattagacatgctcgccaaacatggaacggatggtgttaatattgtcactgcagatttggatacctgtatattattataggtgacattcaggcccataacgagctctggttcgaatgtagacgaagcgatgagttgcggaattttaaataaaaagagagagcgatctatctacctgttgggtgagcgaaagccgctcatttcgcgaaactctgacgattgactactaaggcttcacgggtgctggaatagcttgtccagacttgtctaatccgtgggttccccaccagcgaggctgccaacgtgcgcatctcctgtacgtacgcgtacagctcgcgctccccttgtttgcacgcaaggaagcgcgagcgctggaggaactcgttgttcgacgggagaaaaccggctcgaagctgctcacacagctgagcccaggatgtgaaacatccaggcgacatcgcttcgcgcgtatacgtccaagtcctggcacgtccgccaagattggagagcacaaaggcgactcgaaggttctcggccgagatgagacctgcgctcatagcgatctcggtctcccggatccagaagtgaaggttcccaccttccttcccttcgaacggaggcacagctagccgcagaggctcaggctggacccgtttgggctcgctcatctgagccaacaggcttccctgcacatgagcgatgagcccgcgttcgtactcgtaaaacgagctcacccgctcgacctgctcggctggcgtcgccgccgccaagctccggagggcatctcttccgaagatgcccgccatcgtccgcaccgactcgaactgcgagtcagtcaagtgaggaaactcacttcggtccatcgtggctcacagacctgagccaccgaggattcaggtaagggttttggccagtttagtagaattgaccagtttagtagaaccagtgatattgcagaaataatgaaatacgtgctttggttggctataaaactcttaccacgcgtttccatatggtagttcgatacaaagaccagtattattccgctctactaaactgatcacagcatactgtaggtatgttttctttggcgcgctacaatagcactttcatagctgctaactgtgtctggattggtgcacatgttagagcaaatctagggctttcattgtgtacacgttttatctcaagaaaatacttttccaagtcaaaaattcagcttgctctactaaactggtcaatccctttagatcaatctacccgcgtaggcgtaggattgactacgagtgctaccaggtgtgacggggtcacacaacacaatacacagaggaagtgcgtgcggatattactatccaggtgaacagcagctcaccagttcccggcctcaatgacaacggtttgctacaaacgagtaggttataatactgactgtattacggtagaggttaactcggtcttaatacaaactacaagttagctatactgaagcccacataggcaacccggagcgttgctccgggagggtacacaggtcgacgtgacgaaattgaagtgaagtatatttcgagtaaggcttagcttaggttgaactaaaggaaaaataaaatcgtagacggcgctggtccaacagatgccttcaatggtttggaatgatcgcagcacgtccgagtttgagaatggagaatggtgtgttgaggatgttagaactccatgtcttccggcttggtggagaattgcaggcaatctccctgatacatttggagtccggaaaagcgaatgaacttcacgatgtctcctggctcggggcagttggtagttccgtcccaatcgccccagatgctgacggtggcaaggtcgtgatcgacgcttgctttgtcggcgtcgtagacgtcgtggtagatctaataacattgaaatcaaaagctgagtagacgtagaagaattgggagcttggcaatggcgattaccttcataagctcctcgagggtctgctcctgggttgcgtcatacagatggagacgccaggaagttttccctccgtcacatggtgcgacttccacaggaaacgagcgaagaaagtgatcttctcgtttttaggcatgccgctctcgatgtactcttttagacctgaaattacaatgtgttagtaagtacgcaagccaaagcgaagtataaggtaggaaagcgattacctttgttggtgccgatctcgcgctcggtcagttcatccaggtgttggcgacgttttttggccggtgaaacggaattcgaaggaagggaaggaggcgatatcttcctcttcttctgagcggattgctttttttgtgggggcatcgttgcgcctcggaaaacaaccacaagtggagagcaaagtggcggtgggtggatgtgttgtccccgacgaaatttgaagaatggtgagagatgcaagctggacaaggcgagaaagaaactgttgagcgttccgaagaaagctgatgtggtgacagttagcttctgcgaccgattgcaagcgtattgtgactgagtatggatagttgtggcagttaggttttgaaaatagagcgttaatgttcacatatagacacatgttgcggcagttgacttgtgctcccgacaaggtttgagcgggcacaaccgaaagcaccctgtttcgcaggaggaatgaataaagcattatttgcttctaagttctcggcggtttgcggaggacgagacattttcgtttgtggccttcgattgattatcactggaaaaaatgtacttgcagacttcattgcggtgccgccgttctccaaatatatttgcaggatttgaagagctgtcggaggcagagctggcgaatgcactagaagctaatgaacaacgtcgtcaaggacgaacatagttcagctcttgccagtcggtttctaaaaagtgtggaagtaagttcttcggcagtgtgggggagtgctgcggaacgacgttactatcgtcagcaagcattcgcttatcagggtcgatatggtcaaccaaccttcttcgtaacgctggcccccaattccgataattcattcgtgacggttaactactcgggaaacagcagtacagggagtttatgggattcgtggctatcaaggcttccttcgcgaatagaaacacggaaagctacgatgggggatgacgctgcttcggcgcgagttttcatgaggcaaatggttgcgtttgtggaagacgtacttggaatcaatcccatcactcacgagaaactgccattcaagggactgcttggcggagtgagggcgtacttcggaatgatagagacccaaggacgcggcacgttgcacggacactttctggtatggctcagtgggtgtccgccgaattcagaaagtttcgaaagtgtggtaagctgtgacagagaacgattttggagtgatgttgcagattatggagaaagtatcatgacaaatgaactgccaatttctctcagtggtgggaattgtgaaatctgtggagaaatgtttgccaaccttgcaccgttaccaatacctgctgaagcacgcggtaatgtactagctccttttacggggagacgaattccaacgcacatccgtgaacctgctcttgttaaatgcggacgatgcggggcggagttcagttcgcaacatgtgctgcgaagcgtgatgcttaagcattggccggttgattggcctcctgaaatgcgtccactgacaccgagtgaaattgtcgctcaggctaagaaagaagtgatgtgcagaaactctttgatagaagctgaaaatgtggtatatgagagagagagagagcatatgatcatctgctagcgcaaacgttgccgacaacaatggcagtggtgaattaagagaacgcagcgagatggagttggacaggttacattgtagtaacgcagctcaagcgctgtacactcgtttggacgacgaccccttcttgaattgtgatatcttgcgaacgttagcgatgatgccgccatctgaagacgatgaacgaatttctatccagagcaaattgttcatggtttcggctttggcgcttcgattcaaccaacattggtggtcccacacagcatcgtgttttaaggagtcaagaacgacagggtctagtgagatttgtcggcgaccaaacgtgagcagtatgcgtctgctgtgcttgtcttattccgtccatttcgagaattaagtgatatccttggtggtgcgcccaatactccagaaggttggatagatgcttacactggctggaaagacaaccggtccgatattgctaaggagattatgagcaacctcaacgattattacgtgggaaaggaaattgctgataagagcggcgacttctgtatgcctggccaagtctcgcaatcggattatggcagtgacagctccgaagaggacggtatgtttgctggtgatactggagtagaagccttttccgctggcgataacgtgtgtgcagctgatatcgataatctgtttggtcatgttgatcttggaggtatcgacacgttagttctcggctcaaatggacttgatccagctttctgtccaactttgagccagccagcggatgtactgatgcctactattgaacgctgcctggaatacaacatgtttgaaggtaccttagcatttgttgccaatcaaagtagtggtggcacggatacgtccagtggaaatagccgcgatagtcaattgccagagcggcaaactgtacgctcgtgggtggctgaaaatggtttagcagtggataggctgcggcaatgggtagcctctccggataccgactcaatgctacattcgggggcccaaagaactgttgagaggaatacggaagtggtagagttaatctctgaagtactctcggttgattatcgctcgtgggaaccgatagcggatgcaagcattccgcaaggagacatcccgccgtatgcttctctgaagcacatatcacaagcttacacgcttaatgaaaagcaacacgtagcgttttgcaaagttggcaaagctctgttacaaagatggaaaataaaggagagtgctgagattgcatcacctcgaatgctccatgatcagcagctacgaatgtttctggggggtgaaggaggcacggggaagagtcgggtgatagaagcagtagaagctctgtgctgtagctggggtcgccgcaccagtattataaagactgcgctcactggataagccacgacgattattggaggaagaacacttgctagttttcttctagtcttggagagaggcttgtcctcagtggatttggaggacttggacattattattgtggacgaagtctctatgatgaaaaagtcggagctggcaaaattggatcgactcttacggaagcaaaaaaatgatgaatgttcccttcgggggtgttaacattttattaacgggtgattttctccaacttcctccgattggtgctgagcctatatacaccgacccaacaaaggcagcaaagggcacgccggtaaatatcacagatttcgaactctgaaaaacctttcgaacagttgctatttttttaggaatcggtccggtctcgctctgatcctgaatggggggaaggatgcagagctgcaagacgtggagtatggacgaaagcgtttattgagatcattaacagccgcgttgtcccagaaactccgaatgagttctctgatctaaatatcagagaagttacgggacaggagtgcatttttgcaagtccagaaaatactacacgccaagcgatcaacttgttgtgagagcagcagccaaactgagaggagataattatccttttcgggtcgtcgccaatttcaagggtgcactacagtttcttagtcgacaggaagttgacatggtgatggatctgccagattccaaatttgggcgactcgctccgtttatggatttaatacctggcatgccgattcaaatcacccaaaacgtgcggacttctaagggtgttgcaaacggaacattgggtgtcctagtggatgtgatgttcgatgcgtccactaggttccgcactatccgagatgaaacaactggaatgttggtatcgctaccaagccaaccaccggtattggcatttgttcagatagcacgtggtgccggtgcagtgccaattagtgaaaggatggacccggacatttttccgcttttctatacaacagaggcatactccaagtgcaaaataaagttggcccaatgcacaccaagtttagaagtaaaactccagcagtttccgttcatgtgctcggtggcatccacggcgtacaaagttcaaggtgagacgttaaacgcgctggttgtgctggattggaaatctagcgtttcgtttgcaaacaagcctcagcagaattacctgctggtatcacgtgtgacttctcggcatgcactgcttgccatgaaaacattcacacaagaaattgcggattggtcgaaacctccccaagatgcccttgatgaagaagatcgcctgctggcaatgagtgagcagactattcaggattttgtgtgttgaggggcgccaactgccgcagacatttcacggatggcgacaggcaggcaggtttgggcatcttcagctaactgtaagcttgattaagtacactgcaattgatgctttggggccgcacccttcagcagcttaagaaagactagcagtggtgttggtttcaccagtcagaagctaccagtattggtgacctcaagttctttgattacagcttttcgtaaattttaaccaattcatttcaacgtctggtaaatagttagctcggttggcataaatcttagcagttatcgacaggtacccatattgggtaaatatagtaggtgacaacatacgatataaaacggtgggacccactttggtacccggttctggaaagttacaagttttttgccggagccacgcataggcgatccggagcgaacgctgcgggggagtacacaggtcgaattagtcaaaagttgacctctgaaactggtatttaccagcaataatggctcgatctccgcgaaacatgttcaaatcgcaagttagttttgcatgcgagctcgagttggagccatttctgttaataaggcttcagaaatcaattgatgaacatgatagtggcaatatacgttgtcggcaagaatgaatagttgctaaataaaccgttttgctgacagtcgactaagtcgagttcttgaattacgtcaagaagatactgaggacgaccagtgtctcattttggtgttgaaacttaacaaagtggccattaaatgctctgggtcggagtaaaatttggaaaccacccacaaactgttgcgttaggctagctatatatatatatatagagagagagagagagagagagggagagagagagttaaagctactgcagaaccctgctgatatgaattttgatgccactatcgtattgagtggggaaagtattcagagagtgcctggtgcgcagcatgtgcggcgcactgcagccgcttgcaatgctgacattgcagaaacacaaatccgtggtgcagacccaattcctccaggcgaaaccgtagctgatgctgcgatcgctgtgcggtcgggtcgaccaagatcgaggtcgtcaggatcgaactcccatgacgtagagtatcggtttggtgatccaaccgactccatctccacatcttgatcaccggtcggtcgcgacttcaacgcgatagcaggtagctgctgctccttcagaaaacgttccatggctgcttagaagaatgactcgagtttttccggtgagtgccgcgtcaaggttgctgtggccttcggctctcgccttggtaccgccgcctcgcccccagcacgctcagctcgacttcgtagcatggcggcaccagaaggaccaagcgtcatacgtggcggcggatcatcgacactatcggagtccacgtcttccgttgcagacacgtacggagatgacgtcggagtttggtcacccgggttgggcgcaggcgtcgatctggcgggtgtcgatctcgatagcgtctgaggcgatcttgatgtttctttcaaggatcgactcgactcaccgaccaacggcttcagtaacaggaacggcctctctgtcgagttctggatcgtgttgagcttcagattgaacaggctttccgcatccagcgctcctgcgatgatgccaacttctttgaagagccgtagcagggtctgtacggcatccaacttgtccgatccaggggtcggctgtgacaccggtcccgcaagatcgccgaggagctttggccggaggagcttcatcacgtcgtcctgaagcaggaaagcgttcagctccttcttgtggtacgttacagccagttggtcctcaaccacggtcgtgaaatcggctccatcgtcagcatcggagtctggagccttcatcttcttccgcgacgactttgatcttgctggcttcttcttggtcgatctagcgttgggtggtttggttccggcttgcgcccgtggactttcgtccttcattcataattcgcatcgtgccctgcgggggtccccgaggggacctggggaggaggttgaggtttttcttctaggtccgtcgccgaaccttcctctgttccgttggtagagctcctccctaggctctgccgatccgcggatcgattatgttttagcggcgtcgatggcgatccgatctctgtcgacgcttcattcccttgtccaaactcggcttgcacatcctcttgtagggactcacggtgaaatcccgagtcactcaaagatccgggcacgcgcaccattgtggcgaagtggatccgcgaaatttgcagatcgcgggggtcctcttgcacacggcgcccgaactgccgactaacggagggagtactccgatcttccgtaaggttgctgatcctcaccttgtgtacccgtcggtgggctggatcgctcttcgggtgatctcgagaagacgtgcttggggttgagtcttggactgtctggtggacagcgggaacttgtggcagcaacgcggatacgcttcacgctgtgccggagtagttgtggctgtttcgatctggggttgtctagatcgacactcgccggccaggtgtgatcttggcctggggttgccttgtggtcggtgtgtgaccttccttgcctttccttgcttgccgcttcctctagcggtgggtcgaagtgagggttgacggacgctgggccaagctatcctggcgtccgaggttccttgatcttggggcgtaagtcgacttgcgtagcgtcgggtgggccaaagtatatcccgtgcccggtactgcgaaggcgaagaccacttgtgaagaaggggtaaaatcaactctgtttaaatgttaaccttgcctaagtccttgtcccatcgttctctcacgctcctgtggtccaaccgcatgctcgctggttccctcggccttcgtggtgcgccaccgactctctgctggacgttgacgtaatccggatacaagatcatcattcctttcccggcatcgacgtcaccccttctcaagcagatatcccctggtctagatcatcttcgacgggggtcactcttctggaggtcggtgtcactctcgggggagatcacacttgatcttggtggatggcttcagacttcggaaaattctcttcttgctccaccacatatatatacctgtgatagatagtttatctgccactcaagcgacatctatcggatttttgtttagctccaacaacatgccgacgggatcccgccttcgacggtgacgacttattagttaggcattgcgacgaaagcatcggccactgtcagctacatgattagccattatgtccggcatcattagtgaagtcccagaggttatgcgactcaggcctcgtgcgcaggcagcttcagctccggagccgtgaggtgatgccgtctctcgagaacgcgctccagtaagttgatggagctcggtaccccgttcaactcgactggaatcgtcgagaatcgcggctccatctacgtagacgacatcgacatcgacatcgttaagatcgtcggggtcggctagcttgctacaatccccaacttcccgtgtgttatgttgtaaatcagtttcttcttactaatagcggtgcaatttctgggcagatgctgcggctgcgaagcaggctcaggagatgcccttgggtcgtacgggtcacactaccgaagtataaccaaatgaatttttgtaccttcctattcagtatcaaacggtcttaattcgtgcacttgatcggtcggctggaagtacagattccatcttactcagttagcgatctccttactgcatgatcaccattaacggtgcccagttgattgaattcatgttgagcaggttgtattttattatggacgatgacatggtggataagagaatcagtaagcgttggtttgagtgatattttagctttttttcggctactgtcaggtagttaaataagctatgtatgtgcaacggctttctgaaaaacaaaatgcggtcatttacatatcctggcctacctgaagccctagtaccgcagcagtacgtccggtaatcaacacctctagctctgtgaataattagtcgtttcgcttgtggctaaagggagagactatgttttccttcgtcctattattttaaattgcacttagagtatctcctgcggtgggtcttatcctaagacgtaacagggtctttgagaccacaattttacagttgagacccgcgcagaccgacttacttccagcggtgagttctaaagcgagtcttataagtccattcccgcatgtgaaaattgtattcagtctcgatgcaatcttttagatacggcgactcttcagttttgtatgggtggcattaagattgtggtcttattttaagactcgaaagccaatctagaggtcccggtgaagttaaaacctgcaataggaccttctggtggaagccctaagccttggccaagtcttaacagcgttacttttaggataaaacctgtttgagaccaaccgctggagatgctcttaaaaatgtcagaactgaagtacttcaaaaatgcacgaccagaccaaacctctagtgaattcaagaacggccactattcgtataaatccgttaattcaactaatagtggttaccctcagacaatatcatatctctactcctttatgccattgccacgtagaaacaagataccgcagtacactaacttatatgcccaagagcgacgtaaaatccagagctgttccgggcagagcacggccttgtctgtggactatggactcaggcgacatttgccaattaaagttgggggggggctcccgaccgctgaaataaaattggttaggctgttcagccagctaaagctgtcctcccagtataacaccgccctacttatacttttgaccaccccccttgggcctcccgctgcggatcacccacttcatggatttgagtgcgaaaaaaaactgcactattgcacacgtttagagggactgattggtgcatttttagggtttaatcattcttattggtcgagaaaatcacgaaaagcgacctacttattcttttggccagcactgtaccacttcaatgcttatctgctgcagttgtgttctgcacccaacgaagacatgcggatgcggctgatcacgcgccttacgcgcgccccggtgcgctccaaggtggcgcccacatcggcagtcgagcatctgcctgttgtcaagcccaaggaggctgcgtacggcaatgggacggcctgggtcggcttcgtgacgactgcgacggcgctgggcatcgcggcgctgatgtatcgggatacgcacagcagcgacgtcgagtgcgggtcgagcggagaatcctggtggacgagccccaaggtggagcagcgcggacactacgcattgttgaaggagctgggacgaggaggtggggagaagtggttgagggggttggaggagtgttgaaatagtaatttctatcatctggctgatgatgtcaagggttttcggttgttcggcttgccattgacatccagacagagcaggtaaacttatgaggtgggggcttttggggattcagtagctgataagtttattgcgggtttggctttggtagaaactggcagcgaagattttcgatccgaagagttcgtcgttggagacaattcaggcagaggtacgttgctatttgctgtttgtttgctggtggtggtcaatgatcctgagttgggactgctggctggtgccagtagattgatatcctgaagcaccttggtacacatcgaaatatcgtgtcgctgcatgatgtgctctatcttaaagatgagacgattatgctgacggacttggttgaaggaggcgagcttttcgactacattgttgatatggttggtgcttttgcttttgctgcagatacggttgatgcagttgctaatgtcatattttgacaccaggggtcagtatcagagaaggatgccgctcgcctacttcatgatgtctgtcgggggctcgactacgtgcattctcgcggtgtctggtgagttttcttacattagatgaacatttttttctcgacttcaataaacgcttatcgcttgtgttagccaccgcgacatgaaacctgaaaatgttttgctctcaaaccgatccgccgatgcaaacatcaaagtagcggtaagaatgcgtcattgctccagaaaaactttgttttattaatgacattccctttgaatgacaggactttggattaagtcgtcgtcttcgccagggagagcaagtaatcgagaagtttccaaacggaactgtgtaagtatgctagccgatatgcaagctacagttttgtgggatactaaatctgtgcatatgtagcgcgtactgggctcctgaaatcatcacgagccatccgcaagactttggtgtcgacatgtgggcatttggtgtgctggtacgaactgaggtaaaaaagatgtgtcgtttccttgactgatcgcaatactgtgctaggcctacatcacgttaacgggagtacatccgtttgatccgagaggtgacaagtcggacgccgaaatcgtgaaagagattgcaaaaggagcctacgatggtacgttccttcacatctttgtgtgtatgtggctaaacgctcacgctttatgagtaactaattcatcacatgcagtggagaacaagtggttcagaagtctttctgcagatgccaaggatttcttaacgcggttgctagactcggatccgtccaaacgattgacagcgaaacaagcgctgcaacacccgtggctcagtggtatcacatcgcctgaggaccctcttgacagtggacatacccagcgattacaatcgtatcagcgtctccaacaacttcgtgccaatattttggcagtcatcatgggcgtacagcacgcgaaactgggtgacagccccgatgcaaacgaaaagcgcctagtatcgcaccgcacgtcgactgttaatatggacatgttcaaagagacgttcgctctgttcgacaaagacgaatccggctgtatcgatcgagacgagcttcgaggcatgctattagctcttggtcaacaactctcggggtgcgtattcgtttgctattgtttgcagtctaaacgtcgactaacctgtttttcattgaaccagctcggagatcgacagcattatgcgtcaagcagacactgacggcgacggcaagatatcgttcactgagtttgtgtgcatgatgaatcagaggctcttccgccggtacgtggccaaggcgtcagcgtctttatgacagggcatttctgatgatcttgttttctgcagaggcgatctgacgcccggagatctcaaagctgctttcgacgtacgtatctgccaaatgttttgttttcattttactcaaatgagctaagcttgcgcccaatatgtctcccccaggctttcgacgtgaaccgtgatgggtttatttcgagcagcgaacttgagcacattcttcatgtgctgggcaacaagcacatcagccgtgacgaaatctacaagatcctgcaagctgctgacaagaatgaggacggcaaaatcgactacgaagagttctgcgccttgatgcagcagcagacaaagggctgatcttcccacaagcgtgaggatgacaacgccaaagaaagaaacacgtaagtgttcatggaatcgccgttcatatgagaggtaaacaaggaatcaaaagtgttgaaagtgaccagatttttccgtaaaaaagttttgggcacgaatttgttgaagctgctctggaacatgtagtcggttcacaaggacaacagacttccttcactggaaaatggtgctgagttggttggtcgccattgtgtcttcagctgtcattggactgacccagagcgcagctcgttcgtggcgagcgtccagaagggaggacgttatcacattgcatgccttgactcctcgacacttggtttcgagacaacaacaagcataaatgtcgccgagcacgcatgcatgtgccatacggagtcggtgccgcgggggcgcccatgcggtggcaccaattcggtgcttcccctccgccatgcggtacggtaatacagtacagcccaagcgaaaacgacggttttatcctgaatttttcggctaacgtgaaaatgcggcacttggtttcactatagcgcgcattttcagcaaagggacgacgccgataaaatactgaacgcagtgcaggcgttctccacaatacgttacaccccgaagacatggaggcgccggccgtcaagccccacgcggagtcgccccgcgctctgggcgagcccgcagccgctgcgatgagccccgccacgcccgtggagagcgacgtggccgaggtggagacggagaagagccccgtggcggcgccgctggagctgcacaagccccacgaagacggcgccgagtcggaccgagcgcgcacagacagcgacgacgacgaggaggagccccagaggcagccgcagctggacgtgacgctggtgcagggcccgtcgacgcccgtggaggagccgacgacgcccgttgaggcgtatgcagagccctcgacgcctgtagaggagcacgacgaacccacgacgcccgtgggtgaagcacccccagagcagacgttcgacgagcaccacgacactgctggcgtcgagctggtagtgcaggaagcggaggaggaggaggttgtgcaacagaaccacaagctggaacaggaacctgcgcaggaagcgcagccgtcgccgtcgtcgccttctgctgctagttctgtagctgctgacaaggtggagctacagggccatgacgtggacgttcaggcgcacgaggtggagctggtgatcccgtcgcccaagcgcccggccccgctggatctggtgcaccacgacatcgacgatgaagcgagtgatagcgacgaaggtgaagcagctggagaggacgacgacgaggaaggggctgatctcgggacgcctctgggctatggtggcgctgcggacttcggcgagcaggatgagttcgcgtcacatcgcttcttgggtccgagtgtggcctccgatccatcgtcagttcgtgcactgcacagcttgcgccgcgttgcgcttcatgacaagcctcctcgctttgtgagcgaggcgtcggtggtcccacctagctccgggagcgtgacgagcagtggggagtcttccggccggaattcgtccagcgcgagtgctatccacgcgccagacatgaagaacggactgcgttcgcaatccgaagccgactacacggagaacccgcttaacacatacaccctgacatttacggagccggtgctgggcttcaacacgaacgtcgtggtgtctctggagaacgagctgttggtcgaggtcgagagtgtggataaggacagccctgcgcaccgcgccggcgtggtcgtgggcgactatttgatcagtgtgaacgggcagcacatcgaggcccacatgacgaaggagcaagtactcgacatcatccagaaatccactctcccccgaacgttcgtgttccaacgggacgtacatgacaaggacagttcgcagtccaaaagtctgcctgacaagaaacactcgccttcgaagccgctgatgggtcgtctgggagcggctatgagtacgggcgcatcgatcatcggctccaagtggaagcgcaagaaaactattgtgcatcagaactcgttttgcgatggatgcggtatggatcccatcgttggctcgctttggacttgtagcgtgtgctcaaactacaatttgtgcaaggagtgctacgacttgggtactcacggcatggaaaacacggagcagatgcaggcgctcagcgaggccatcgtgcagtataagctacagaagaagtgcaagcatttcacgcccgagttcctgctatcactgcgccgcgatatctgcaaggggcgaccggacaagttcgagtacctgggcgagtggattgcgaatattgtggtggggacggctgcagccaagatcacagtgcgcggcatcgagatcccggcccttccccccgcagcccgccagcgattcgtatcatatctaatgcctctggtgtcgaaccgaaccgacatcgaagtgaacatcgagtggctgccggacgacatcgaccagattaacgctgccgctcgtgcgagcgtagatcgaatgagcgccggagcctacggtagcagcgacgaggacggcacagaggcaccgcgcgagaatttagagaagctgcgcatctggatttccgacaagaagacgcgcaccacgtcgccgtttgcgtgagcgccccaaccagggtattttgcatgtggtgacgtggaagcagaccgataaaggcagatgagaaggagggccccccaccacacaggacgaaaactcaagtcacatatcacgtcgtatatggagggtgggtctacgctgcgagcgtgacgctcagcctattagttagagagccttttgtagagcttcatttccgatttcaataagctgcacacagcacagcacaggaacacttcaacttagtgtagccatctgtaaacctctctaatgtaataacaactatcagctttcacagaccctatttaccgccatgcaattatcgagtttcgcagattcgggtcgatgtgtggcagcaaagaggtctttgctcaataaccctccgcaactcaccgacgggacaagatgctggcctcgctgcgctcgcagatgggcgctctgacgctccgcccggccgccggcagcgccttcatggggcgcgtggcccgggcaacgctgtccacgaccgccgtggagggcgagacggccgcggacgacgacacggccgcgttcctgagctcgacgtcgcccgccgagccgcgcaccgtcaagaccgtgaagcgcgccatccgcgccagcccccgcaagctcacgtacctggcgcagcagatccgcggcctgccggccaacgaggccatcctgcagatgaagttctcgcccaagcgcaaggccgagatcttccagaagacggtgcagaacgccatcaacctggccgacatcaagtaccagattgagccggagaacctcatggtggccgagtgcttcgtgaacaagggcacctacctcaagcgtctgcggatcatgggccgaggtgcgcacggctgaagcgttattgtttattattgcttctattgcggtgagaagcgttgacttgctaacttttggctgcatttgtcgagtgcaggacgctcgggtatcatgcaccacccgtacacgcacctgacggtggtgctgcgcgagttcgacccgtccaagaagccgctgaaccgcttcctcaccaagaagctggtgcgcgagaacgccaagaagcagctcgagcaggaggcagccaaggaggaatagatgcagaggcagacagacgtgcgttcaacgttcaagttcagagggggatgcagcccgtttggggagagcgctagtacagtttagtgttggtctggttgcgcctccacgttagaaacacgggcaagcggacacttgatggccataacgacgaatgcacagctatttttcgtatacagcttctcgtgattcatcgtcaggtatttcttcagctgaaaggcctctgctgagttagatctcaatcgtattcttctggacaatgggacggcatttttttcgcagctccttcatcgcaaggtccttgagcgagaggaagacgaaccggttggtgttgacaaatccatcgggaacttctgctccttggtggaaccttaattaaaggtgctgttgacccccgtcaacttgttcatcttcacggtctccgtcgtgactctactctaggccccttcgcgactgctttttcgtatacatgttcatcacggtactgcctccgggctgacttttcctacccaagctttgattacggaacacccgaccagtgggcgagcagcgcccctccacgtagctgctctcaccctattgtgtccgtcacagtacagtcttccaggatatcctcatcttttcttctccttcgctcactctatctctcgctaccaagccaacagacaagacacaaccagtatgaagtggtcggaacagctcggcgccaagctccagacgaaggacggcctgcaggacacggactacaagctggccggcaagaaggtcgtgggcttctacttcagcgcgcactggtgcccgccgtgccgccagttcacgcccttcctgagcgccgtgtacgacgacatgatcgaggagcacccggagttcgagctcatcttcatctcgtcggaccgcgacccggcccagtacagcgagtacttcggcgagatgccgttcctggcgctgcccttcgaggagcgcgccgccaaccaggccatgagcaccaagttcggcgtcacgggcatccccatgctggtcttcgtggacggcgagggcaaggtcatcaccatggacggccgcagcgccgtcgccaactcgcgcggagacgtggagaagctctgggagcagctgaccaagtaaaggacagcgagcaggatctgacgcggcttccttcggtgtcgtcggtgggttgaactcacggattcttttggagctgatatcagttgtatagttgcctttactcttctctctcttctctcttcccaagctttttgagaaagaatatgatgttccccttttgctatgatttagtagcgctcggcagtttggttgtttttgactaggttggctgcgagcggcgaagactccggagaagggagagtttggaggcgaccgagacggatatcgctgcatctttgctgttgtggctgttgttgcctggaagacgacgctcgtcctgcttgttcgacagcgtcgacaataatgcttcgggcggatcgctggagagctcggggtagttgctgatcccagcaccgccacggagagtcattacgcggcgtgacttgccggatgaggggtctgggaagagaccgtggagtacggcgctggtctggaagaactggtctcgaaggcgtcggtgacgacgagctcgctgaaagctagacgacgctcgagcctggcctgcctcgtgggttgtctccagtgccgctagacgactccagttcgcatcagggtccaggagctgtgagatgcgctcgtccatcacttgcagaattcgagccatctcctcagcgacacatgcgaagctcatggggtactgcagtcgtacaagagtctcaacgtcaacgcgaagcgcaagcagcagcaatggaatgagcaccgcgagttgaggtcgtgcggttgagcgctgcttgcgatccatcttcgctcgcagaatcgcaaaccgttgtgcaatggagacgaatagggcgtcttgctcatagttgctacgtttgccccctttggcagtggtggacgggtgtatcaccgtcagatagagatatctcacggtgctctggacgagttctaccatggcaggactaaccaaagcttcgtaaagcactgcgcgtgtatcttcatcaccctcgggcagccccagtgttgccagaggcagggttaggaagaactcgttgtgcatttcagccacagtgtcgtcgctagagcttggcggtatgcaccgttcgtcgacagatttgagtcgtcgttgagctttccatttgcgaacagaattcggtgagctaggcgcagcaccagcctgatctacttggttctgcgacaatgcatccactgcagcatgagtcccgtatagcttcaacacatcgggctcaggtgggggagtggccagcttgaaaggtagcaggaactttcgcttcatgtcgtcaaaagtgaaagagaccgtgccaatctggaaggcatgacgagtctgctgaccccgaagctgtcgtctcggtgagaacagctcagcagctggagctggtgctgatgctggttccgtttcagtcttggccgcctcagctcggttgccaccaactcctttgactggagcttctcctgcctgcgtgagggacttgggattcaggtcgatggccaacacgtcagccagggacccgcgcgatttccaggctgccgaaaccgcgcacttctccagtggtaagtgctgcaacaccatgacaatgttctccggagtggagttggcaccgatctgctgcaggtagcggttggcgaactcatctttgaccgcttgagtcagtcgcgggggcaacgcagtcggcgtgtgctgcggtttcagaggaacagacacatgcagcgcctgaactgcgctaagatcatcactgttaccctgttgggcgacagaatggcgtcgggatcgtgtcgggggcatccctacgtctggtgatccgggaccacaacaacatgcacttcaacgaaaataggttatcttttcattggtagaaatgcaatttattgatacgattggtcaatattgatcaatatttgaattttgaattgtgacttggagtttgtatgccacgttctcccgccgcgtaagcagttcaagaaaagcatcgagtcgagtccacactatccaggataccaaggtcgcagtgagcatggcgcccgcgacgttcgacgaagacccggacgcgctgtaccgcggcgtgcccccgcccgtgccccgagtgcgacctatctcctcctcggaccgcctgctgaggcccaccaaagcgtcgctggctgcctcaagggagaaggttctgactggcaaggacaaggagctggcggctgcgcgcgaggtggcgcgcaagaggcgtcggctggctcgcgtggccaaggagaacgggcgcctgacgatccccaagtcccccaagttccacaagctcaagaaggccaccccccgtgcgcgcgccgacatgttgaccaggacgtcccgcgagctgctggagatcgcggccatccgcaagcgcgtgcaggcccagaagcgcaaaacgcagaagtaccacgacgccacgacgcacggagctgcaccggggaggagcgatcagttctccagagccttgtcggccagtgggggcgtcggcgtcccggctgttcgccgtccgaagctcacgacgcccgtgggcttcgagttcgagatcgacaagcgcgctgcaacggcagaggcccgcaagagcttgaagaggaagagcgtggcagtgacggcgaaggaggtggaggcctcagtggaagaggatgggaaggccgatgttgagaagagcgagccgccactgaagcatcggcgaaagtccacagccgcatgagtgagcgacagtgctgtggtcgctggccttgcgacttactaatgatgatttaatgccattttatttctactaacgaagtgcagtcgcctccgacctcagccaacatggcgttgagccgccagcccccagcccggctgggccagcgcgtcgcagaagtgcaatggcatccgacaagcaccggcacgtcgatcagagacgtcggggagcgttgagacacaatggcgacgtcggacgctgtgatacaaagctcgctcgtgatctggtcctgttgccttttgcttcaagcctcccgcgcctggatcaaatggttagccgttggcagacgactcagatggacagccccacttccccgaggtcggctccagctctccagccgtgccgaagcttgtcgaacacgggggtcgctgctcagcgaccaattctaccgcagacattgcagcagcatcgctccatctgcgttgcatcgccttgctctggactgcagctccgccgtacatgtagttgcctgccctgatagacttcgcccagttgcgacgacatccgcgtcgccactacgatccgcgatcttgcgtgcggcgcggtatcgctccccatgtgtgtgagctcgtcgcgcttagctcgcctcgcagggggagggagggaggccctgcagcagcgcgcaccttgccatgaacgacgctagcagctcacatccgccgcggccagctcactgtcgcacgcagccatggtctccgcgcggccagcatggcggccgactccgcccgcagcggctacagtgccgctgctccgcggcgatgcgaaatttgtgcgaattccacaaaacaagatttgtcctcgccgaaggagatgggcggcaagctgaagagactggcaacgctgataccgcaattatttctgcacacacatacgagtcctgcggcgcccacgaacgccggcgaaggttcgtgtcggtacatactgctccgcccggctcgctgacagcggataacaccgctatattagcacgttgaagctgtttgtttaacccccgagtcggggctttttgcgagcagcgcgccgctcgccgctgagcgatttcgctgtggctgggtgggagttgccacgcatttgggcggcgcagccattgcggaggaatccactcaaaaaaatgaaaagctgcgcggcgttggaggagccgagctgcagcgttgcccggcggagttcattccctggaagagccggcggcgtcgcagcggcgttgcctcgcatgcagccagcggcggcggaaggaggcggtgtctcatacacaaccagctttgtgcgccgagtcagcaaccgcttgatgcaaccgcattgaggcagtccatgccactctggtggaccaaagcgtgcaagcgaaaggagagaaaaagaaaagcctgcgagaggaagccgcccgaacgacgggcacgtctccgcgggcgttgcgtctggcaggccgcactcgagcgctattacggcgtagcgcagtgtcaggagtgtgccggtacggacaataaaaaactttggtctcgcgctgttaaaaacagaaatcctccctgaggacaaggcaacttcaacaccttcagctttagcgatctttttttggatctcagcaccgccgaaagaactctcgtaccgcatatgcatgtcgcatgtatgctgctaacaaggcttccgaagtaatttattttttcttgcactttgaatatgaggcggcgttttgtttctcctgcttattgcctcggcagacctccctccctcgcgatcgaggcggtcaggtggttttcggggagattagtgagtcagtggtgacgacgaatcgcctctccaacgctatcaagcacctgtagccgtcacagcgcagtcgcatcgagctgcataagagagaacgccccaaccgccggagcctggaaacaccgctatccgattgtgtaggccgccccaggctggaagcaatcagctacgagccatgatttccagcatctggcctctgctgcggcaaaaggagtcgaagtgcccccacgtagcgaaattccagttgtgtgaccgcaagtgatctcagaacgaacaggtgcgctcgaggaagctcgacgcgaaaatatgccaaccggctcaggtcggggcctttacatgctatttgcgccgccaccgacgttatatgctatttgcgccgccaccgacgttatatgcgatgctgcagcgtgctggaacttggccctaccgctgtggttactgctttccagcggagaacgcggacgaaatgcatttcgcactgacgtggttccgcagacagttttgccgctgcactacaagcgcaaccgaatgcggcagcagcgctgacatgaaacagcaaaatgttgacacgcatcagtctgaccagtgtcgctggatagccttacaccaccggcgcagctcgtctctgcaagccgcctggcgccgcgactactgcgcgccacaagttggttcgcgcgcggctcggatatcgcacatgctccaccgaccagcaggcggaccaagggcatgcatgctcctgcggggcggcgggcgtaaattaccaagcgataatttagcgcccatctgcgataccgcggcgtgctgtacaccggtactgaacagacgagcccgcagtctgcccagctgccattggtcaatctttttgcctcggacggctccgagccacaagttagccctagccgcgccggagtggcccatccccccgttttcgctcagagaagagccactctacgtgtcaagagctaaaaaagtgaccagcgggtctccgccgccaaagtcacatcaatcagctcacttccgaattttgctcgtgccccgcagcaagcagcagcaccacaccacttcagcaaccatagcagcccccacgatgatcatgatgcccaccagcacgcacggcagcagcctggtgatcgcgtcgcccgcgcccacgacgccgatcacgcgcggcctctggtccgagcaggagcacgagcagttcctgcacgccatgaagatgttcccgaccggcccgtggcgctccatcgccgccttcattggcacgcgctccatcaagcaggtgcagacgcacgcgcagaagtaccagcagaagatcaaccgccggcgccgcggcctgcgcaaacagaagaagaagttcgtgcgcccggagcaccgcgtcgacgcccacgccactggctgcatccagcgcgtcaagaacttcacgatgcagggctctccgcgctcgccatcggccttcccagtcggtgcgatgtcgccgctcagcggcagctttggccagctattgacgggcggatgcagccccgtagccagcgacgcaggcagcagctgctccagctccagcttctccggtcttgagattgatgtcgacatggatacgctgctgagcggcctggagccactgccctacacgcccggagtttcgttcgaggacgtcctggccaacgacgcctaccgacaagacgtgcaggaatccatcgacctgcttcttgcctaatttattgcgccattgcggcaatccgtaacacctcaacagaagtcctgcacggccaacgagcccactgcaaagataatatcattcatttacacacacacacttccttcttcccaaagggtttttgccaggttgtgtccgcgatccatccatgcgtggctgccatctgtactgcgtgaccttgttgaccacctcagtgctgaagtacgatctaacgagatctcaacgacgttgggtcaacgttgagcgagtctcagcaacaggtacagtagtttcaacactccaaggttaggttggcggcgcatgctcttgatgcggcagttagtggcggtttcccagtgcaagactgcattcggggtccgatttaaagcgcgcccctttcctccttctctacttggggtctgcgttcaacgagttcggggccttcaagtctgccgtgccggtgctgctcgggtgtcgtcaagccgagagcgtggtcatcaagcaaatcaacgcagctgacctaattttgtgacctgtggtgcacaaattaccaaaatattggcacaatattttggctcatcaagatgtaaggaaaaaagcaagccttgcatcgctagacaggaattggacgcgctgcaggcgtcaaaatactgcacttgcctctgttgtcatagatgtgaccataatgcccgctgcaagctgtgaaaatgtcacggggctgcgaagttgccggccatgaccgtacatactagtttatcccaaccgtttatacttttcggaggctttgccatcggtcatggtccatggctcatggtggcgcacgatgaatcgcggacacacgatactatagactacaaaatcaccacgttgattttaacgagaaggaactcggcaacaagcacctaccatacaggtgcaacaagcgttgaccagactcatgcaagtgtaccctcgaaaacaagttccctgaaacacgatgaaattgaatgctgttcgctatagtgcgatgtcatcgtgctccccaagtgtgaagctgtaaagcacttcggtcatttacatgagtttcgagcttcacagccgacaaagcggcacgtgttctgtgattcctgatgcagataaacatgccgtcactaatgtagatattccagctgagttgcatgcgttcgagcacgatgaatgagcgtggtggcaaacatctccgccactccgccgtaatataaatgtcatggactcgcgtaattgcttgagtcatgtcggacgctgcgtgtccatgcagccgtggttgtcggaattgctgataacgtgagggtggaccattcacgacgaacgtgcaggacctaaaccaaagcactgctttcgtgtcgtgttacgaggatgaataaggatatagcataagggctaacggatccctcgacatactacatgtacacgcagatgcattgggtcgagctggcattagggtacagtgagcttgggatatggagacggtacaaaaattttgtgtttgctgcgcgaattctgcggagtctgcaccgcgggtcatgtatccccaccgtgatagtctcactgcatacaccaacgctgtgcgaactcatctcgaacaggttttgagcaatttgctgatagaattcggcacatcacccagatacgaggtccaatacaaaccaaaagcgcagaatttgcttgggggctcacgctaggtttgccactggaggcataagcatgtttatcgtcgtgctctccgtggacgcgcctaggataccgagcgcaaccttgattcacagtcgctgaacgaagggctcgactcgatcgaattgccgtcgcgcgcttggccgctgccttcatgctcgtgcaaccaacgtgtgtcagcactgctgcctgccagagtgtgaagccgcacgaagcattctgctccagtcgatcaagctcgagctttggcgagttgaaggcaggccgtagacacgacgcccgagttgaacctgcaggagcttcaacgcagcggcaatatccttccccgtgcagcacttcccacgtggcgatttgattcatatcattgccaacgccggctctcgacgcagagattctcgccgcaagctaaagctcgtcgatgccggcatgaaatctctagagaaaccgatggcaattggcttgtgacataattacctcttttcaaaagcaagctggcacttccagcctggaaaagctcggcatgctccaatcgaagcaaatccggcctgcaaacctgaatatgagacaacgcgccacgtcattaggactatttcgtaattcagtaggctgcatcccaacgatccgtttgagcaaagatagtaggtgaagcgtactgcgacgcggttagattatttttcagtacataagcaaggagattggatgcagcagaagcactccaagcttggcaagttgttgcggtgctggggctcgtgtgcgctgaccgccgactcggctccgcggccagttgtcacatggggccgtgggtttcggccgagttctcctcgatcaggagctccgcgtcgttaggctcacttgccagcaacgccagcattgctggcaagtgagccttacgacgtgcagcgacacatgttgtggatcgcccatcgaccgggatcaggaagccggcgcgctcaacgcagacttttgccgtcggcagtttcttgagcgaggagaactccttgcaggcacttcgcgcgcaggaaatggaggtggtttgtctctgcgcggcgcattgcctcgagagtgatggcacttcattgcgccagcgattatgactggggggttgaacttggcggcgcactcgccccagtatgaccgaattggaccggcacgggagtccaggacggcaagcaaatgacaccccaatccgaagacgggaacaccattgtcgaaggatcaagcgggggctgctgtgtcggggatcaactcgggtctccagccgcgttccgtggccgtccgtccaagctgctccgtcgacacgtcctccccattgataaaggcttgtattggttcctctttatgatataaatatgaagccacctcgcgtggaacgaggggctcgttcacggatacctcaccaaataatgacgggtctatcccgtcgctaccgaactaatagcaactgatccccagctgcaggaggttatatcgacaggtagtcgatcaggaagtctagtgactcgctcaccgttgggatgtggacgggatccaggtcgatgtcatcgccaaagtcgaggaacggcagcggcaagaagtcatcagtcttcatctccacgtcggtaccgcgcgggctgctatgcgcctcggcgggctcctccttcaccaggttcttcttctgtagcggctcgagcttgggtccactggctcgcgacgacgacttcttgcttgctgctacaagtttctccgccgcgcagtccaccagcttgcacagctccatggtgtcgtcgtcgatgcggtgctcggggcgcacgagttttttcttcgacttgcgcagtccacgcaggcggcgcgacaccttctcctgatacttttgcgcgtgggtctgcacctggcgcacggagcgagtggcgatgtggtcggcgatgctcttccacggacccttggggtagagcttcatggcctcaaggaagcggtcatgctcctcgagcgaccagatccccttggccgtcggcgaaatgggcttggccttgggcttggaagaaggcacaggggagcttgatccggcagcaaccgcgttcatggtgacggagagactggaactgtcggtggcgtgtccggagagaagtgccgctggcttggctggctgcttgctcgctcgctgtgaggcgaatttgggaatggcagcgctgcggcgatccgttcaaggacaaccacgttggaggtcggcacgtcctatcaatgtcggtagagcctctatggtcagtaaacactccctcggggccccggtgctgctacctaccgccatcccgcttagatgcgagaaaaaacaggaccggttgagcgacggggtcagcgcagtctcactggctggagcgctgctgtgggccgtcgactcgacggccacggtggagtgctgctggcggggaggacagttgccgacgatgccgccccgcgtgcagaagtccggcgggtcgagtgcctgtgcccaaggaacaagcggacatgccgaccgcagcggtcggcaacaccttgattaacacacagttacttacccgaaagtgcaagccgcgtctcgctaggaacgcaacgtggatggcgagcgttgacgcccgtgggcgtggttgaagctcagctgagtggtcttaacgagctcggtgtaatgagccaaatgtaagagttctccttgcgaagaaggcttgtcgcggaggtcatcatggctcgtaagcaaggctccaagcgagctgtcctggccgaagcccgtgaggcttggatctgcgttgaagcacgcaggatgggacggcagccaggtcatcgattatttcgggctccatttacatatcgctttttgggctctactaaaggcccgtttctggcctatacagtggccaagtttgccgaagcgccggtacaaactggagctcgacgctgttgtttttatgagcttcaacagcagcaccacgacgaccagcgcgatcgccacagcggtacaatgagaaggcgatccgcagagctcactccgtgctagcggtggaggcttgagcgcgacaggaagcgctcgtgctcacgctgtgcatgtaccagaatggtggcaccatgcgggagcccagaacagtgtagcagtattttgggcacgctatcgtccatgcgctactgaagatctccccaatttgcgtttcacactttggctggccacgacggctggccacgacgccacacaggactgactaccggaggcccagcccaacccggccacaacaagcacggcagcgtcagtcaatcgagacggcaccggccacacgctgattgatcctttgagtagggtagagcttatcggaaccttggcctccttgccaggcgtacagtgcagcaccacgatcgctcctgaacctctgcgtataatttccattagcggccccgcggtccgctgcgagccgtaccgccctgtacggtttaatcctcgtgcgaagccctggcttgcacggcagtggctgacaccaacccagcggcttgccatcgcttggcacatgtaccatgatgtcggacgacttggcggggcttgatcggcatcgtttctaagacaagttacttgtcaagtctgtttgaacagcactcaccgaagcccaagcaagctgagagcgcttgtgtccggcgatccggaaatgtcggtagagtgtcggtagggggagcagctgcgcaatcaagggaagaatcgcctgccgccatgtcgctacctacatgcactttcgcagcctccttcgtggcgtggctcgcgggtgatcgctgtgatttccttccgccctggaggctggtcggcgcgccccaggcctaggggagctttccgatgcgacacgggtttctctgcgtggatgatctgctcgcttcgaccactttcaggtctcggcggctgcaaatgcgaggcttcgggtttgttcattcgtgcagaagactatgctagctacactaacaagtgtagctcgcgagagcaccaggccattgccagctatgccaatgatgattttctgtttgacccgccggacagccgtgcggcaccgaagatctacggttttgaagcgtggccgctgcgagtttttgtggccgccatttgacgaacgaaagcgatctgccttacgacgcgcggcattgcgccggggcgccggagcaggcaagacagcggagctacacgtgcctcgatttaactcgcgagcagcgctccactcgttggtgtctccactcgagcggtgctgacgtgcccagcgagatccctgcgacacacgattgcaatcattttgattacccttgcgtttcattagataacggatggagatggacccttttgagtgatcgcaattaatcgaagatacggggactataccgaccagtgagcaacttgggcgtgcaacctcacttcacgcaacttggatagctttcaacttgacccggcgtattgagaaactcaaattggagagatcttcggtaagctgacggtaaatctgcggggcttgctgcgcgacgcccgagttgttgttcatgttggtggtgctttcgtttagcacagacgaatgcgcacaacatatacgtcacgttcgaaagtaggagacagagatagactcggtcttgaaatatctgtagctgcgttcctcgcgaaacatggtttgcaactgtgggttaaccaaggcgttgtcggcgatcgctgcggtcggcatgtccgccgtcctctatcctatggataacgttttacgtttttgcactgcatgcggtttacatcagcagcccccaaggtgagcaccgcatccccactgccttacacacacgttttgcttcggcgacggcggaaactgtgcgagtactcatagattttgacgacataccgtaggtatgagtgatattttggcaacctgaggtacgtgctgtgtcctagattgtaaaccgctagtcattttggcggaatgctcgattctagacgtatgtatcactgtagcatcaggttgctcggagaactaaaggagatggtactcgatctcgttggactcgcgatgccttcccagcttcggcgcctggaacgaccgtagaaaccaccgtgagcccaccgcggtcaggctgatctgcttgtgctgcaaagccacaacttcataccaaatcaaatggcggcacgggagctggtacagcgcgaagaacgcgcagtcgcacgcgcttccgtcgcgctgtaagatgtgcttctcgcgcgttgttttgttcagccaccgcaccgtagcttccggggtggttaacctgggagacgccggcgactcgcttgactccgatctggtgttcgccgcgtgagctctagccgtcctagttttagtgacggacacggatccgcaagcgcctgagctttggctagtaagctgggagcttatcgcatccacgacgaagctgctgaggcagttgaccagtaagagcaaccgcgggtcgtaacgatccacagcaacgggcttggtgagctcaaggagcagcatcttggacgtccactcgccttcaacaaaattgatcgtggttagcacctcagccgtgcatttggccagcaggttgctagtagtgtcttttgtagactccacgcctcgatgtgccccagtcacagttgatgaattgctagccagcgatgtactggtttggctatcaacaatgcttccagtagaccggaacgggtccttggggctcacggcgtggccaactgatgtaatcgcttcggtggcgaggtgggatacgcttgtggctcctggttccgcaatgtcgttatctcttgtccgcctaaatgcagtttgcatcggctcccagtagctcttaattcccttcgtcaggaaacttgagaagtcgaactgctccgtgcgcgcgtacgacacccaaagcgcacgatatggctcccacattttatcaaactggccaagtagttctctcttgtcagcaataaccaggtgccgcactagcagcgccttcgcctcgttgtatctggactcggagtgtgcaaatacgagttgctggagtaaatcgcgcactttgtccggactgaagtttcgatccgacgtctgcgagtgagcttgggctagcagatcgttgagaatctgaagcacatgaaactggcacagcagcaattgcgcctgtgggaactcgtgtgtcagcacttggacaacgtcgcgcaacagtgtgctcatgaccagcactttcgtttgggtccatttcgggtgtgtccgcttgaaatcttggcacactcggcgcaacagcgacggtgacatggccagcgatcgcgccaagaaaactggtttggagttgcccagcgcatccatggacaagaacccgtgcaagtgctgttctccttgtgtagtcgactgtgctgccgttgtcgcatccaacatcagcagctccgggaagacctgaaagtgctccttcatggctcgactagctagacaaatggcctcgttggagccgtcgtcggccgataaaatgctcgcgtggttttccatgtctgcgtccacgaagctctgtagaataggctccacccgagcacctctcacactactgcctggattcttcgtcgtgctctgcggtgcaccaggactaggattgctggcagtcgtttgtggcggctgccgactttgactcttctcgcgcttcttcagccttgcatacaggttgtgcatgtccttcatggtgcacactttgcccgtcagcgcctcgatgtgagctcgtgcggctttcttgttggatccgatccggcgcatgagatcagcttcgtgtgtgaggtaagggtgctcgatcaccgccgcgcggttctgcgagtacatgcgccactgctcgagactcaacgggtggtcggtgtggaccaagtgctgacccgtgaccttgatgaacagagcctcgcctccgtcttctgccagctcgctcgccacacacgccgtgaagcgagccttgcagtcggtgtagcgcacgttctgtcgcggtcgggagccgccggaccgcgacacccgcttgtagccatgggtgcacacgtatatctgcatcagcagggacaattaccatgtagacatcgattgaaacaagacgaattagtccaatgtggacactatttacaggtagatggacagactgaaaggatgcaccttgcggtcgtagacccaactgtcgggcacctgcagcttgcggcgcttgttggccaccgtcactttcaccgtgttgcgacacacgtacatggtgtacgtcctctcgcagtgggccttccgggccacgtcgaaggcctcccatgacgggaagcgtccttcaaagggcaccacgtcctgcgctgtggacgccatcgtactggtccgcttcttgctcttggttgtctgttggaccagcacgaaatatagcgttacttcacgacgtcaaccaatcacgtgcttcgaggctggcatgagtgtgcacgtgcatgtggggcagtgcggcaaccagatcggcgccgcgtactggcgcctggccgctgcttccagtgatactcagccagataatcgtagcaaaggcgatgctggtggctctaggcggcttcgtcgtggatcaggaggccccagcgccgctgtaaacgcccccaagaaggatccgctactgtccagacacctgttccacccgtccagtagcgctgcgcgttgtattctggtggactcggagccgaaggtggttcgcgctgtgtgtgaagctgatgtggatgtgtttgcaggcttccagccggctcatacgcatgtggagcaagctggtcgaggcaacaattgggccatggggtactacggaccaaggctgaaaaccccggctccggcctttacgtcgctggctgtggatgatcgccgagaacttgtggagctggttatggagtctctgcaacgtgagattgaagctgtggactgctaccaaggcagtgtggtcatgcactcgctgggtggaggtactgggtccggcttgggctgtcgagtgctggaaagcatgagggacacctatccgaaggcttacatcgtgactgcatcggtagctccgtcgtgcacacacggagactcgcctctccagaattacaatgctgtgttgaccctccggtgtctgcaagaggttgccgatgctgttatttacaaggataacgacgacctgctacgaacggctgcttattggaaggctgtagttcaggagaaagtggggactgatagttcgaatcagcgggtatcactggtcgagatgaacagcatggcggcggcagatctcgcggggcttttgttccccgtagcaccgggcgattctggtatgcatcggtcgtttgacttcggcaggttactgcatgatgtatgccctatgcctgcaacgaagatgcttgacgtccgatctggtgtgtggagggatcgtgctgggtcgggtatacgcagtaaactgccctccaaggcatcagtggcgaaagatgtctattcagcgaccttgtttcatgccccagtggttccacaagcgcgttcgttggcgctccgacatgagcacgctgctgacttcaacacgtcgcttgatatgctcgagaagctagtgcatcaaacggtagcttctttcccgcgtacttctggcgcagctttggcatcgagtacactgcttcggggcttctatcccgcctccggtgagcttgatcgcttttcagaaaagcttggtgcaatggttgcgactgcgttcccccctgtgccttggttagcgacaacaccacaagccacgctaacgttttctaagtctgcacctttctcatcgctccaagcgaaagcttcggcaaccatttgcgtgaataacggtagcttcttgacgagtacgaagcgtttcttagaacgagctcagcgtcaattccaagctggtgcttacgtgcactggtacagacagcatggaatggaggatggtgattttgaggccgcttttgatcaatgtacgacgctcataaatgaatatgaaacgttattgcgatgactccgtcgatgttgctcaatacaataagctccgagttgattatctttgcaaatcacttctcaaaaactggatctccgctgctagtgaacgaatgcgttcttttgtgcgaagccattgcttcgttcgagtcgcgtgctgctcctccattgatcgaagcttcgactgaagtcgtgggtttgtgtttacttctccacgtaatgtgtcgagctgttgttgaaacgccacccactctcgttttcgccggcttagtgccagtagttgctgctccaacgtctccaattgccccagtgtagtactaggtaggagcagatcaccttccatagctggagccactgaggtaggcggcactccgcagcatttacactgtcctccgatggccgctgctgtagccggcagctttctatgtgatctgggcggatcaactcgattgtccggtggtaagctgagaggaacaaaattctcggcaggaaaatcaaagccacagcgtaagacttcgcgcgtcttcctgttctctttgcctcctagccagctctccgcttttgcgtcggcaaagagcgtaacctcaacaggtcttcgaggttggggccggtttcttggaagcaagacgaactcggaaagtggagatcgctcatttgtccagttggaattttctgagtgtgcagcatttgcatgtccgcggtcgcccgcatctcctcgcggtagcttcacagtcggcgtggagtgtgcttgtggtgctgatgcgcgttcgaatgccgagtgtgcgtctggaattcgtcggggtgcatccctcgggtttactgagacttctcctttacatctgagagctctgcgccggatcgcaaggtaacgccagtgacgagctattgctgcaactcgtcgccacacggccgtcgtgttacttgcttgagctacagtcattcgttgctcacgctgctcctgcaagtgcattgcggtcgtcatccaatggcgcagaccgtcgcgaacaaattgtgtgtgtcgaaactcgagagcttcgtggatgcgctgttgcttacttctcttcatctccaggtactgcttccagccatcgaacgctttgcgttccaacgtcaatttccagtggacaagcgcatgccgtgtctttttgcggtaacgttggcgcgccgaaacattgtgtcgccaccgggcgaagcatttcctaagcattacggctttgtggtgctgctcggcgcgtgcacgcgtaatttgctgccagcgcagtacggaaacagacgagatccattgcgaaaaatatttttgaagcacgcgtcgctgtgcatatccacggacctgggcgtttacaactcgtgcagcagctttcgcgcgagcgaactccgaccagttttcgaacactgcagctttggtagcttttgctttcttggccatgcagccttgtaacacattgctcagagccacctcgtgatctcgttctgcttgccacatctccttccacatacgaaaacagcgtctcactgtgcatttatagtactgctcacttgcagcaagtaccatcaccttctttgtctgagctctggcgaagaagcacagaaaccccttcgtccaaacccgcttcaacagttgtgattgcgagtgaagtaaagcacggtcgcgctttaacgcttgaagtttcctgctgctcgtgaaatggtcccaacgtgagaacgcggacgctatggtgctagcgtctgcagcgtctagcatagtctccactcgacttaatctgagttttccttgaatacgccaagcccgaaaacccttaaatcccatacgtaacagcgtcaggtagttgtggcgcactgcgcgacgtctttgctgctcccggtgttctttttctcgcgtccgagcactccaggcatcccaaacgcgtcgcaaccgaagctcctggcgtcgtcggtggaaaatgtcaagctgagctagctggtggactctcactttccatgccctccacgctcttttgcacactttttggtacatgtggcgctcaacaacacgaactagcatccgctgcccctgagctcttgcacactgctttgcccagacatcgaatgcaagttggagcaagcgctggtgacttttgcgcgtcagagcatcggtaatgggttggtacagagatttctgatgccgccgccgctgcacatagtccctccacagagttagagtttcatgcaatcgtagacgcaatctccagcgctgcatgctcttgaccagcaagcgatttctattcgccttcgcaatcttcaaagtcagttgccgctctcgccttttgaccagcgtgtgccgaccgagctgacccaatgagcgcttgagtagccaatagtacaagaagaagtaggcacgctgctggagaacatcagtatccttcttcttccggacaaaccctcgccaacgccgaatagcgtgtaacgaacggatgcgtacaatgaagttagcgctggttgcagtgtccttcttctcctgctcaaccccaagttcccacctctgtacaacaacaaaatacttggttagttgctttggagaagaaaaaaggtggcagctcttcgcaccttgaagtactccatctgcgtcctcaaaactccagcaccttgttcaagagaatctacttcttcatctggtatagaacctgctgctattgtgtcctcggtaacatcggcactattggcaccttcctcctcttcttccagatcctccatttcattttcttgagtttctcgtctctgctgctttcgttcagccacaaactcgcgccagcgcgtccagaagatccgctggtagaagacagagcccacgcgacaagctgcggcgatccgctatttataccagaacccctcacactattagtctttgtcaagagttatcgtgagtgaattcaggtttttgctgactgtttgcctcacttttctccgcacacactgcgcttgagcgcgctgtttccacgataggaatgtacgcaagagctgggtgtatcggtcgtggtgtacggctagctgcatctgcgtggacggaggcgtccaagggtccacgagatcgccatcgtcgaccttggagccggcctccaacattttgcctatgaagtcggcgattggctgaaaagttagcgttacttcagaactgtagccatgatgtcatgaagttgaagttaacgtgatttttgagcgtttggactcgaggaattaaataatacaagtagattggggctatttgtcaaaacgtaagtagatcatggggactacttataagtagactgggggacgttgattaaacgtattttaactatcacctgctacgcgctgcgcgcggccctccagaccctaaaggctcgctgtgctcgcttggacagaaccctaacaagcccgctgcggctcgcacgcgtcgcctccgcttgctagaagggcaatgctgggtcctgggtttgcatccgcgtgcttcgcacacgggctgacaaaccgcaggcgtgggttcgcttcgctcgctgtgcgctgatggtctgatctacttataagtagtccccatgatctacttacgtttggacaaatagccccaatctacttgtattatttaattcctcgtttggactcgtgcgcgccataaaatgcagacgctcgttagtcggttagttgctgcttggatccccgtcctgcaaatacaatgtcaatcgcccccagtttcagaccagttgatggcgaaccaaaacggggcgtaaaattatctcacagggaggagggaaggatagctggcgtcttgcatgcgctcgatttgttgtcgcttggcagctaaaacaagagggtctttgtcggccaacaataacctgctataaacggcccccatcagtctcagttccttggtttctccgccacaccagtggacgtcgtttggttgcctagaaggccttcgccaattattgagatgcgtggtgtaagtgctgccgactccagggtaccaaggtcgctaccgtctcgaccccctagtgctcgcttcggaacccatgacgagaatgagccttcgagagcgacgtcgccgtcgacgaatagaccatcgtcagctttgaaatcgacggggcaccggttgattcatgacgatctgccacagtccgacccaaacgaaatccgagatgtttctccgaaggtgagggcgccatctcccagactgtcctcaccgtcaagacttagcggtctctttgaagcaattgaacctggaatggcgactgccaaagacgagatgccacctccccggttgagcaacccgtcttctccaacgcagcggttcagtgcgcgtctccagccccaagacattgaagtcgccgcgagcgggtctagtcgacaatcatctgctaccaagctcagcggacgccttcaagtccatgatgatgcgatttcgaccagcacacaggaaatacccgtcgtttctccgcgaaggagtagaccaacttctccgtctcaccattccgaagaatgccccatcgaaaagcccgtgaacaaacctggggtagtagtgaagtccggaatccctctttcccccatccgacagctcagcgatcgtttgaaaatccacgacgacggagcgatcaccagcaagcagaacattgcaccaaaggtgaatatcccagtatcgccagctcgacaactaagtgatcgtattttactgcatgacgagggagctaaaagggaattacccgctggattaccgaaagaagtcgttccaatagcccccggggcagttgaaacgaacgacacatgggatacccaagtccaagctgcgataaacagccagcatgatgagaagcgtagtcttcacgaatcaacttcagatattcggagcatcaagagttcaacaccaacgcctgaggcatccgcctcgcgattcgtgcccttgcacagccagtggacctacggacaagccgtgttcggacgatacaagaaaaccccttacttctactcgggtaacatcgccacgtatctgggggctggggtgttcatggttgtgttcgacgacggaactctggactatcgggtaagacgggaggacatcatgctgcgggaacacaacaccctgagtccacaaaagcgaaagcaacggcactctcaagagcgagatgaatcggacagtgggaaaaacagcgagagcttcagcggtctcgaaccaggggcagacgcgaaaccgcaacgaaagtcattgcctaagctagatttaatgagtgacggcgactcggtggactcattatcagccccagagctggatttgctgccgtcccaacacgtcatggtggatttctccgtttcgccaccaaaagaaatggttattagcttcgacgactcccgaactaacagtggggtggtgtatagtcacagtcagtgtggtagcgttccccctagcgcagacgatggtgcttggaggaaccttctggaggatgaaacactgacaatgaagcgccttgagtgtggcgtaggctacgaagatgattccacgcaagtgagtgactcagatgaatcgagcgaggaggatatgtctatgacaccatggcaacaaatgacccagacgtttggtatgggcaaagctgcgcgggttcaacgtggcacaggacgtcgatccagtatttcatcaatctcccagatcgatcgactgtctatcacgcagaagagcatgaaacaaatcatcccgtcaccaaagagtctcaagcaggtcataactgagtacttcatgcgcggcaacaagaaggttcagccttccaagctcagcgacgagctcgctatggccgaacgtattcgtctcatggtagcaaaactcgacacaatgaaatcggctcgatgcaacgccaccaacttaggtcaagcaccacccccgtctcgaggcgattgcaacagtatccgggttgtctacgagcgcgcgcccgatggagtacgggcatacggctcggtcacaaaactagttgaaggccgtggatacgccatcgtgactgaggatgatcagagtatctcggtgcaggttgtgcccaaggacaaagttgatttccttccttctgtctatgaactggagcaacagctttgtgacttggagcgctcacaacatgtgctttatgctggtcaaaaggttcacgtctcgttgtacccaggaagccgtttttcagggcgtggactaataacgttggagcgggagcgtcagtctcgctttcatgttctacttgcaaaccgcattcgacttgtgaacgtgccagccgataagatcagcccattgcgcgagaagaagaaggctgcggtgacaatcactgaagaccagttccttatctgcaacaacaaggtcaaagtgtacatcggtgaccagatttatgtcaaatgttcggctggaaatggtgatcttgacagtaccgctgaagaagagaagctgggacttctgaatggtatctactcgaaccgaacagcggctgtcgactttgcagatggatccacaggctatgagatccctccaaacctcatctttaagcggaaacgcgctagtgttccagcagatcaggacgtgcggtctctcaagaacgctgtactcatgcaggcttccagtggagctaaagacagtttcccaatacttgaggaaggataccaagtcaaagccgaccacccacggaaagccgcagttgagagctgcatcgttatcaaaacgcatgcatcatcagcgtgtgacctgcgcttttcagacggtaccattgcgttcgaagtgtttccatctcaaatgatcatcgatagcgtggagcaccagcgcacaatatccaaggccaccgccaccttgactgcaaacgacagcttcaatcgatcacggcaaccggtgtatgctgtgggagactacgtgcttgcttggagctcacgctttggtcgatactgctccgccaaaattatcgcgaagacatcgcaggatcttccagccacctcaaatgaggtcatatcaactccatcagcgagttcactcactggtgtcgaagcgttggcgtccccaacaatacattccattgcaacgataccacctccaacactcaactgcctgtatacactggtattcgactacggcgagaagaagtcgcaaatgccaccggacaagataacccgcttggatgatgtcagcgctctctctcataaccagcggcttacaaattacagtatcgacacgatgggctttgagttatctccagtaaccttcatggtgggcgagtccgtcatggcccgcgttcacggatcggcacgatactttaatggtctcgtggaagcagtgaacgagaaggaacgagtatgcgcggtgtgtttcgactcgtccgaacacgacactgtggttcccttctcagccatgttctctgtcgactccaggacgcgcttcactggtcgaagttctagcacgaagcaggcaggaagtgggggcagttcctcgtcggagacaacctcgaaggctcgcttcctctctcgccaccatgtcacagaagagcccgccgcggaagttacgacgcgtccacgacgacacagcagcggatccgtcggcaacatcatgaaatcggtagcggactcgattttccgaggctcgcgttcaaagcccagccttgggccacgtcgagcatcacacatgataaccgagactggagccagggttcaagtaccagaacggtagtgccaatgcctattagcctcctgtgcatatcacaccacaactattctgcgtcaccgagctgggagcgaatcccgctgcaagacaagccgagccgagcccaacacgagataacagcttgcccacaaagttatacaacccattatttagaaataaaaccagcttccgctgcttggagcccctgactttcttgctccacagctgcccatacctacaagaagacgaagccacacaggcaacacgacgactatcctcgcaaccgtagcagtcgtctacttggcagcgaaaatgatacccatgacggcgatgaagataagcagagcgaaaatggcgatacaaatgagcttcatctttgaacaggcgcagcacttcctgcgctgctcagcctgcttcacctgctccagagccttctccacgttgtccttggccgtgtcggtgttctccacaatctctaccaccatctcgccctggtcctgcacaagcccgtcgatctcctggaaggcggcattcacctcgcgcagttggtggttgatctggataatgtcgtcctctctccgctgcagatctgcattatcaacattacaaatcgagtgagacctcaatactacctgcaacaaggatgaaacaactcgcaacgcaccgtcctcatcgtagatgaccacgttggcctgcgcgtagatctggtcttcgctgtagttggtgaactcggcgcctccacggttctggcggccgtcgccgcccttgaaactctgcgaggagcggcggatgaactcgaccgactgacgctccgactccaccagccgctcgcatgtctcctcgaacacgcgcacctggttcttaaagtcggccgagagtttgttgatctgcgtgcggcgcgcgcggccgctcgggcccttggtgccgcggttgagctcctgcaggcggcggttgatcttggccacgagcttgttgcccttctccgtgagctccgtgatctgcgtgtggttggcgcgcgagtcctgcggcgtgccgaagagcgacatcttctgcgcgatgctgcgcgtgagctggttgaagctcgagatgcccttgctggtctccgacacgagcttgccgaagcgctcgtccgagacgccgccgctgctgtcgcgcggcgactgcgcgctgcggtaccggtcgcccatgctggctgggaggtaggtggggtggaagctggagctggaggtaggtgagccgagcgctacggggcgtcggaggcaagagcgcgagtgacgcccgctggaccgcaatccagccagttttcacatgcaaagcattaagcggtgccgcacctgcgagaatgaatacagaaaacatgtaatattgagggatctagtgtgcacatcgtacacaacagatgcatggaactaaatttgtatctacgtgtctttacaaatgaccagcattactattcatataaggaggtgcaagaaacccgcgtgagctgattattacttacgcttcgacgacatcgtcgagcaaagtcgtgaatttgcctgcggcttgcatggggggaccgtgaaaaaagcagctcgtgggagcgcgggcggtgggggttgcctcgcggcgctgagatttgcgcggcgtaaacccgtgacagtcgacgctgtgttgctgcaacactgttgcatgatagggatgtcggtgctctctgtcatcgattaccctgagaaggagccctcaacgcttgctgcggctgcttggtcttcctcttcggcatgggagctgggtactgtacgtccaggtggtgattgccctcttggccaaccacaacgcgaccatgttgaagcgcgactgcattttacaggtgtcaagagttcaagtccagcacgggctcatcagtcctccaacccaaaagcgccgtggcctggcggatgatcgtggtcgtctgacgaccaagcaggcgacgccagcaaggctgtccccgctgacgtcgtacaatcgtccgccgcaagatgcatgtaccttgctgcgttgcggcaacgtatgagcgaggcaacggtggcaattgctcgtcgtcggcgacgatgaacagccaagtgccagcagcgcgccatgccgccgagttgaaggtgttgattgatgtggacggcggcggacgtcgagtgcgtcgtctgctacctgtaatcctaaataccgtctgcattcagtcagcagcgcagcacggaatggcgcgtcgggtcgatgcgactagcccaccagcaatgataagcaagcagcaggcacatgctgaatccggcctgctctcgccgtgagctggtccatcttgggagcatgcacccaagagagcaagccaaggcaacaacctgtagctatctgcggagccgacaagggagacttgcggaatctattttcagccaatggtctgccctttcgccgctcgttttggccaatccggcgcggtgaatcaggtgtggaggcctctccccgctaagtacgagattttcgacccaccaggtccgttcttggcaaaacggagaaaaacttccagaaggcccttttcgggcaaccgccatacagccgcacaatggggcggttgcgcgttcagggggatcgcgcgagctttctcccccctttgggccccccgcagctttgctgtcattttcctttcgtagcaggaagcagcagagcggagtcgaagcaacacgaggggggacaccacaagatggctcttaagcggatcaacaaggagctgcaggacctgggccgcgacccgcccgccaactgcagcgccggacccgtgggcgacgacctgttccactggcaggcgaccatcatgggccccgaggacagcccgtacgccggcggcgtgtacttcctgaacatctacttcccggccgactacccgttcaagccgcccaaggtgaacttcacgacgcgcatctaccactgcaacatcaacgccaacggcggcatctgcctggacatcctgaaggaccagtggagccccgcgctgaccatctcgaaggtgctgctgtcgatctgctcgctgctcacggacgccaacccggacgacccgctggtgcccgagatcgcgcaaatttatagaacagaccgcgcgcgccacgacgccactgcccgcgaatggaccgccaagtacgccacttagagcacgctaggagtaggagatcttcgtcccaggccgcgcggccgcagccggttttccactccgtccttttccgacggggggatctgcggctgctgagtgtacgccgggtgagatggagagcgaggacagtcggtaagcagcaggaaagtgcaagctagcgataatctcagcttggtttgtttttcgtgctgagtcagggcgttctacgtggggttggatcttttgctgcttggtcttgtcaccaccttctcagtgtttatccgatgcaggagcgcagtcctaggataggactcctagcagtcaaagcaagcgtgcttcttcggtgcgacgcgtggtcttcatgagctctgactcatcttgatcacatgcccgactatctgtggttttcctccctagttcatgtgtaattgaaccaatctccatgctatcttccatctgctacacttcaagctacttctgggctaccctttcatgtcttctagccgctccaggctcatacagggcggccaagaagaagcttctccggcccatgttgcgggttcgtcgcgtttttctggctgctcgtttttggtgtgcgccacaccatcatgtttcgcgatttttgtcgcggattgaacctgtcaaacgcaaaattcacatcaggcaaagcgcgcggccatggacaacttgtgcagctggtgcggcgtgacgcgctggctgtacaagtgctcgacgtgcgacccccgcgcggagaagcggctctgctccagctgctccatactgtggcactcgcgcggcttcgcgcgcagccaccagctcacgagcagctacggagagacccgttcgtatctcgcgtggggctcaccacgagtgattgacgcaagcaacggcagcgtggaagcggaggcaaaaccagctacagatccatccactaacggagtcgaagcacgttcagttccagctagtgatgcggcggatgcgaagcctgcagctccagaagaggaaaaggcgatggacaaggtgaatcctgtagcgggggcggaagaagatgcaggggcgccggcaaagacgaagcaagaggatggagagaaggagaacgagtcggtggaagaagagttcgagtttgaaactgtgggtgagtcggtcgacagcggagaggacggagacaacgctagcgttgaacaggacggcgaattggaggagaaggcacaagaagctcctgctgcggaagaatcagtgactggaaactcagcagtagcatcaatgccgactgcaaagagtgcagaaccgaagacgggcgagcaagtgaacacgaatggggaccaagagcggaaggaagacccacccactccgtcggctgccacttcaactccagcacctccatctgcgccatcttctgatgctactttgaaatcgtcaactacgcccacgccagcttcagaatccactacggcaacctcaccttctgcagctactacacccagcaaacaaccgactgctcagtcaaagcttgtcgatcttgacaagctgctgcgctggttcccgacgaccgaccaggtgctaatggaaatgctggcaacgcgaatcgaatcggctctcgtgatcgaggacgcgcttatatgtgcacgtattggaaagtgcgaggaggacacgtgtcgttctgttctcctgcactacgagcactgtaagcgggacgagatgtgtggagatccaaagtgctccgagatattgatagtgtacaggcatcgtcgcgcgtgcttgaagaaggacacggctcctagcatcgatggcaaaaagtttgtgtgtccgttttgcattcgaattcggcaacggcgaagtcttggcgtcgtagccgctctagatcacttgatcagtgaccagcgtcgcgcacttcgaagcgcacaaagtgaagcgaatcgcaatttctgcttgcaaagcattaacacgtggacccaacgtaagcagcttcttcgagcggaaacggaccggcttaatgagctagccagcgaaagcagtgctcccgtgtttaatttctcaaggtatcagtggcacttcagtgatgccgtcgttatcaaacgagaaccagaggctgctgaaataagcgaagatgccacggctggcgcatccgcagccgaatcatcaacaaatgacagcaatgatgtgtcgatgactggaagtggtgaagacgaggagaatgctcaaggtacgcatcttctaaagggttgttttctgcgatggtgcaattctctaactcgtgtaacttactggtacttgcattgattgatatgcagatgatgatgcagataccaaggaatctcaggacacgctgggtgatagcattccaggcaacgcaaacttcaacgcggattttatcaatcaattactactggctaaagctgaaaatggagatggcaaggaggtggcgcagcgggaattcgacggtgtaatggagctgggctatgcgattgtggatgcatctttttgtgcaccatcgaaagctcagcggtgtctgctgaactgcaagtcgatcctggtacacttgcaacaccacttggatctacaagtgtgcactcaaccaatgtgcacagcagtggagcatcatttcgcgcatttatcccaatgcaaagcccgcgacaagagtgactcctgtgagtactgcttacgagtggaagagcgtcaacttattcggtcggtcgatttcatggaggcagaagtaccggaagctgaggcgaaagtgcagaagatcattaacgatatcacggcttcgttcacaaaccaccctgatgagagggagcaggagatgattcagctggaggacgagctagagcaggtagaagaaaacaaacgagaactagtggacaaactgaacgccgcgcggcatgatcttcgaaaggtgcgcaaaaatttcgagcatcgagggatgtctacctctggcagtcgtcggctacaggtgcatttcatcaaggtccggcgcaacgaaggatcaactagcagctcgaagaagcgacgccttctcggctcgctcgactagtaaatgcagtatcagtaccatagagaaaagacccgtcaaagtgctaggctattgcagcaaatacagcaagcaagcggccacgaaatggttgtgggaacttatcgagtcaaattttaacgctgtccccatacaatgcattgatatgcaccaacatgacctgacaacatggtattttgttgcgccatggggaaataacatgacctgacaacatggttttttgttgcgccatggggaaatcacttgagttgcagctattcggacggaagattagaagctgttgcagcaccagctggactggtttgcgttgcctccgttggcagcactcgtggggcggaaagtgtcgttgcgcttcttcgcctccgactttcgctcgaaaatgtcctggtgctccaggatgcctgttaccagcgccttagcagcatcatcgatgtggatgttctccttggcggatgtgtcgaaccagcccgtaaagttgttggtcttgcaaaactcgtccaggaagccccgatccacctcctccttcaggtcgcactgtagcaaaacaaaacattacctgcttagtataaccaatatatttcatctcaaccacaaaagtagcacagacgcaccttgttgccgcagagaatgacgggcagcggcttgccgttcggcagttccaccttggagtcgatctccttcttccactgcaatcacaatgtgtccaacgacaagtcagagcttattatcacattcacaccctccgattcaactgcccccaccttcaggatgctgtcgaaagtctccggacgggacatatcgtaaaccagcaacgctcccagcgcgtccttgtagtagactcggttgagcgcccggaagtgctcctggccggcgatgtcccagagctgcagccgcaccgtcgtgccgttcaccgtcaccgccttgagcgcgaagtccacgccgatcgtcgtgcggtggtgctccgagaaggcgtcgtgcacgtacctagtatgtacgtgtacagcagctcagcagcagcgtcagcctccctccccctctctgagattgaagctgaccaaccacacaacgcaccgcttgatgatgctcgtcttgcccgtggcggcgtcgcccagcaccagcactttgatgaccgcgtcctgcgcggcgttcactcggcgctcgctcatccttacgcgtcaatacacacccaggcaagacgaaggagctgctcaacccgagagatctcaaactgattccaaaagaacatcacacaaacaaaatggctcaattggtgtacgccacaccaacacagcatacaaacataacgtcacaccggcttccgcttaggtgcgagctcgttgcaggaagacacatcccaaagccaagccggccgggcgagtgcagctccgcccctcgctccgctccttggcgccatgagcgacgacttcgagcgcgcgcaggtccgcacgcggcctcggcgtcgcagccgcagcagcggcgccatcctcaacacgccgtccagcgtcgagcccagccccgacagcgtcagctccaagagcaggagcagcaacgtcaccactgctgccggcgccagcatcagcaacggagagcgcacgctgctgcccagcgacgtcatggagctcaggcgcagcgcgtcggcggaccacgtggtgggcgcggggcggcgcctcagccgctcgggcttcaacccgttcagcaacagcggcggcgtgggctcctccttccgcttgaacagcgccggctcgagcttccgcgcgggcgcgggcgtgcccgtgtcgtcctcggcgctgcgcagccacgccagcttcttgatgatggacatcgacgcggccaggcagtcggtggacgcacaatcgcaagctgccagtgcgcgggccgcgagcttcgacgaggaagacggcgtggacgacggtgggagattgacccggaacatgctgggggactcgactgctgggagaagaagcagcggcagcgagagatacagaagagcgtgtgcgttgcgttggcaagggtgtgtgcacggtcggagtagggagactgattcaggtttgtttttgttttattattttgttttttttactggcagcctcattggattcgagtccgccactgcccccggatagtacgatatcggcggaggaggtgatccgggagagtatggcgagtgcgctgagctcgtcgttgtatacagacaaggatgattttttattgccgcatcaacggcggtctgctgctgtgaatgggaacttgaatattgcggggtcggagcgagactcgttggccatgtcacggcgctcgagagacagcttggcgttttcgttttcgagtcgcagcacctttcggaggagtacgatatcggagcagatgctgtacgagacggatttgttcgaaccggaacgggaattgagtgcgcgggagctgacggaggtgctgagtgggtcggatgaagatgccaatagttatgaagtcactagtataaaggaggaggaggaggatgtcaagctagagaatgccaagtccaggtgggcgcaacatgttaagctcaaggcacggagcttcctatactcgacagtatcaggcaataagaatggggcttctgttgctggtgacagcagtagcggctccatgtcatcagctacaccaacgtcagcagaaatttgggcgaacaaacagaagcaaattctatcgcaaatgagcagcggtagtgggtttggcgcgatgtcgggcgcgccgtcttcatcgaatcatcaccactctttgcttccgttgccatcgttcggacctgcatcaaatggtggcgccaagtttcagaagtggaatcgatggatgcacgatcagtaccagcataatttcggcaaagtgatgcagcgcgcgttcaaggacgaggttttgcagcagcaacagcagttccccttcccagcgcatcaaccgactccagacccgacgacgcttatatccatagaggaagttatcagcaacccgcgcatgatgcggtactacgcggcctggcttcccgatcctgcagaccagagtaaactatttttcctctgctcgtttgaggagtatcgccagttttggtgcacattgcgcgctaactaccagaagaagccttttgcgaaggacgacgtgctaatgctgcgcacgtacggcgttaaaattgcgatgaaataccttgccaagaacgcgcagttcccaatcaatggcaccgctgatgatgagggtggaagtgacgaacctcctatcgtagactcaaacaagctacgcagcatcaagcacgatctggcggcgggtggtgaagatgcactacgaacgtttgacgatgtcgctgtgaaggtgaaacgcgtgctcatgttcaagtttccggagtttcgcaagaccgatctttacactgaaatgcaaaagaccgtggagcgtgaagtcatttgcttggaagacatcctgatgaatcatcgcttcgccaactttttctggatcttcctgttcccgcacaactatcatcgggaaatcgcgctgtggctggacgtcgagtacgagttcaagccagcgttccgcatttatatggccctgctcaagtccagcggcagctctcgaagtgctgcggcgcctagcagcacaagcagcaaccaacgtcgtgagcgaatagagcaagctgcgtatcgctgcagaaggttgctcaagtatatctctcagaaatactacgctggggataccgagatgcagaccctgtcacgcaccctggtaacatcatgtgcccgcctccaagcggaacaagacgcgattttgaccaagttcagcctcatccatctggagctataccatcgcttcctcacaagtcgtgcatacgctgagtttgcgctgtacccgaagctttcgcctgaggacgagaaggactcgattgacgactccatgcgtctctcagcgctgcttttgagttatgggcttcgtgcgcatcactggacgggaggtagttcaagttcttcgtcatctagcacatcgtcatcctcgtcgtctagttcgcgcgatgctgaaaccacaacaccgaaaaagaagactcttgactcgctccggactgcgcgaagctttgaagccgtatctggtgtactcacttttgaagctgtagcagtgcccctgagtgcggaagacgccgaaaatggtgctgacgagaatggtggtacagtgttcgaagactcgattgaactgcaggtagtgcagcacccattgccgcatgacccggccccacaccccgtggacaaatccgttgagaatttcctggttccctggtgtgcggatccgaggcatgtagtgctcacagcaccatcctgtccagcacctttggctttcaactttcgaatgggcgatagcagtgctggcgcgtcggttgccgagttgttcgcggcgtgtttagtattttataagccggcaccccccttatcgcgtcgggcgctcgagtcatcacgaatagaatctgctgcggggtgccgatgggtgccttatggcgtgtgcgtgctgtcgaagtttccgatggtggatctgctgcgagagcgcctcgctgaggcgtatgaattcattctggagcttgagaccatcgctgctgccgccgccgccaatggagacggcaagggagtgcttcataacggtggacatggcttccagctggacaagaaagttcttgccaagttgactcgtgccgttgccaaggagcacatctcgcaatatcaccagccgtcaccgctaccggaatcatctcttcttgaagcctcgggtttaacccctaaggcgacatcgggctcgcttctcgcagctcttccgcgtcttgaccactctgtaagactactattcgacacgctggacgtatctactgtgcttctcgtcttcacggcagcactgctggaaaatcgcattctgctggtatcatcgtatctctcggtgctgatgaaggtcggcgagtccttgcgagcgctgatgcaccctttgttctggccacacgtgtatctgccagttcttcctcgacgaatgctgcaatttctcgagtgccccacgcctttcatcttcggcgctgagaagcaagctcttgaagaagcccaacgccaagtggttgaagaaggtggcgatgatttgtttgcgggtgctggagaggaactactggttgtggacttggacaagggagctgttttacgtggagaagtgccctgtgcgcttccggatagcgtgaggtttgcattacgtgatgcactgtacgaatgcctcaagcctaacgtgagtcgtagtgatcacgtgtttgcacaccacttcccaagcaagccgcttgtgtttccggaggtggcagtgcgcggactcttcctcagggctgtcaacaagctcatcggcgacttcggctaccaccgctacgtctggacagacgagtttgcgcgcaagcgcacggtcttcttcgacgaggctagctatcttgcggcgtccgcacccgatatgcgtgagttccgcacgctgttcatcgccacgcaggccttctcggagtttatggtcacacatcacggcttcgaggagcaaccaggccagtcgaacggcgcgtctgtacctccccgttcatccctggcacctccaaggaaatccgcgtctacgccctctacttcctcgtcttcctctgtgtcatcgcagccgcggacttgaacgtggcatggcggcgagtcaaaactatgtgtgaaaataaatggaccgtagtgtgttaaaccctcaggaggatgcaagtgtagaacttatatgtacgtgacgttcgcgttcctgagctaaaccaaacttgatatttactaccgatgcgaatgctcctgcgttggtaaacttaccgacgaagaacggatgccaacaacgttgtggctgcaagtagacccagcactgtcgccggtgcggtgaaggtcgatctccacaaacgtttcggaatcgttgtactcggtacaactgcactggaggccgagtgagtttgctggtgctgacggtggcgcgccatttcttggtcaatgatggtgtagagaatagcagcaactcgacggccgctgtgcttgagcatgggagccttcttccactcacgcgctacgtgaccagcgacgaggtcttcttggaacgtctggccctgaagcaagacggggtgcttgctagccaccatctcaggagtaggtagcaagagttcctcaccacgctccacgtacggcgctagaacatcttccggcgggtgggtgttgttggcgatcacgtagtcgatagcgttcgcgcctagatacgtggacagcacctccagcgttttctcgagtgtgtagtcgtcggtctggccactctgcgtcgtcacattgctcacgtaaacggtagcgccagcgctgcgtgcgatggcatcgcgaatacccgggaccaacagtgtagcgatgatcgacgtgtagaagccaccgggactgaggatgatgatatcagcctcctcgatggcacgcactgcaggctggaaggcttcaacgtcggggttttcgaggtacacgcgcttgatcggcgccttcttgatcctctccttctcaggcttcgggggcgttgcagggggcgatccactcgaactactcgatgaggattcggtgcctgaccggggttcatcctcttcgtccggcacaaagggattacgcacgttgacctccgagatgacagtggagccgtccgtgagctcagcacacagctcggtactttcaagtgtggctggtagcacggaaccgtgaatgttgagaatatcagagatcgacgagatggcgcgatcgaagccaccttgcaggtcggtcagcgctgccagcaacaagttgcccaggctacagccctccatgaagttttcgcggaagcggtagttcatcaacttactcaaaagttcatctacgagcatgtaaagaaaggataaacgtcagtgctgtgcgcgtgcggtaaggtcaacggaagaacagactaccaaccggagtcggaaagagcgacaaggcagttgcgaatgtcaccgggcggcaagatacccaagtacttgcgaagagcacctgagtggcgacccgagtcgaacactaggagcagtatacaacacaagtcatccacataagctcaaagagataattgcaacagttaaagcgtgtacctgttactactgctgtaagatcggccgggtagtgacgcagttcctttagcagcacagccaaacccgtgccaccaccgatagccacgattttgggctgcagcatctgctggtctgccaactttacaattggtacgagctgctcaatcgattcaatctatgatcaccaaaaaacaaacaccgcacaatgagcctccacgtaagtagaaccccaccactaagcacactagacaaagcctccttacttggaagtccggttgctccatctcgtccgtgggcatcacactcgtgtatttaccgaacagctacaagcacacaaacaaacaaaagtatccaaaacatgtcaaacaagcccttcccaaagcaaccccctccgtctcagaaagcaccttaccactcggacagtgagcatcccgacagtgtttgccgccttgatctcgtagaaggccttgcgtcccacgaacgtgacggcggacgccggcacctccagctgccttgcgagctgcttcatggcactcgttacctgagccaggctcgggttgggactcacgtacacgacctggtcgaacaggtcgtccacgcccagagctttcaggcgttcgcgctgcacctccggcttgccaatcagcagcagcgccagacgacaggccccaccgtcctgcagctcgagcagcgtcttgcgtacgcccgggaagggcgtgatgcctcgcgcctcgggcacattgctctcgtagtaggcggcgatgacgcgctgcgcttgcgcgggcgagagcttggcttgaggaccccccacgaggctgtcgacgaagcgagggaagcgcttgcggagtccgtaggcgttgcggaaggtctgcagcgcctcgaacgccgcggcgttggtcgggaacgcgccctccgccagcagctgcgccacgccgcggtcgatggccaggtgggacagcagccccgagtggtcgtacagcacgtcgtccaggatcatcgccagcgcgcgcacccgacgacgcggacgaacggaggacgcagacgttggcgagccattggcggcgggcacgcgcatgccgctggggagccgacgcagcgggtgcggggcagaagaagaagaagtggcgtcgtcgcccatggccgcaaggaaggaagggagaatggaaggttgcttcgacgcttcgactgggcggtaccgtgtgcgaccaagcagcaaaagaaaagcgaaggtcccacctttgtggacgggctctattgtggacagattgatgataggcatctatggtggtggtgtatgatcaaaaggttcgagtatctactgtaggtggggaatctaccggcgctgcagcatgcgcaaggccatctcttcctggctggccacggcgttgcgatcgaccttcctcttcttgtcactcacgtcgtcctcttcgtcttcgctgctgctggcctcctcctcctcgtcgtcgctgccgctctcgctgccactgccgctcatgtcctcgtcgtcgtcggagccgaccacaaggcgcgcgccttcgtcgtcgctttcgtcgtcgcgctcgcccttgatcttcatgcgcttcttgtggtgcttggcacgcacacgctccttctcgagacgacggtcctcctcgtccttggcggcgagacgagcggccacctgctccgtgtagctcttggcgtgcttctccacgtcggcgaactcgctgtcgccggtgttgcgagccgcgaggcggtccgccatcttggtactgttgccctcctcgtcgaacacgaccttggaagcgttgatggcctcgcggtccacgcgcagcttcttttgcttcttcttgctggggccaagcgcgtccaggtcgagctcctcgtcttcgtcccagttgtgcacacgcttgacaaccatgagcgagtcttcctcctcctcttcctcctcttcggattcctcctcctgcttcttctccagcttcttcttcgcctcctcctgctccttggggttcaacgcagccaactgtctcgccagacgcttgcgctccttctcagccttgatcttctccttgagctgctgcagcttgcggttgacgttcttcttgccacgaagctcctcacgcagagcctcgttgcctccattctcgtgctcagccttcatctttgacaagaagggcatgcgcggggcaccagggagtccaagagattcggcgtacgcatccagaggcagagcggtagcgtcgaacacctcgcgatccggctgcaggtacaccgaacgcacgtacgacatgaaagccttctgtgccagcgacttgatctccttgtcgctagccacgacggacgccaccttctggcggcagctcgtagtcttggcggggttcagcttcgtctcgcggatcggcaccttggcatcctcgagacgcttcatcataccatccacctccgacgggacaaggcacatgagggccttaccctgcttgttgtaacgagccgtacgacccacacggtgaatgtagttagccgagtcttcggggcagtccagctgcaacacccagtcgacctgagggaaatccagaccacgcgccgcaatatccgtagcgaacaggaccgcggcgggtttgttcaggaactcgtagtacacctcgacacgcttaccctgcttgtacttgccgtgcagcgcgcaaagcgggatacccggctgcagcttacagaagacgctgtgcacgaagcgcacttgacggcacgtggacaaaaacacgatcgtcttctgcttcaggtgcgacttgatgaatgacagcagcacgtccagcttccgctccagcggcgtcaccacgtagctctgcgatagtcccttgggcgtcgcgttcgccgagtgctcgtggacagccacgtactcgggctcgcgcagactgagcgcggccagatccttcacggacttggtctgcgtggccgagaacagcatcgtctggcgctctccagcgggcggcaggtgctccaggatgctcgtcaactgcttctggaaacccaggtccagaatcctgtcagcttcgtccagcaccagcacctgcaggttgctggcgtcgaaggccggcgtctgctccatgtgctgcagcagtcggccgggcgtacagatgagcaggttcatgcgaataaggcggatctgctcctcacggaagttcttgccgccaatgaccagaccggcagagaacgcgtgcgccttgccgacgttgcgcagcacctcgaagatctgcagcgccagctcgcgcgtgggcgagatcacgagcgctccgagtccgtcctccacgctccagcggaggcggaagagcttctccagcaccggcagcaggaaggccagcgtcttaccagagccggtcttggccgctgcgagcacgtcacgccccgccagcgcgtgcggcagcgcgcccacttggatcttggtgggcgccgtgaagccacaggtgcgcagtccgcggcgcgaggcctctgacagcgggaacaagtcgaagctggcggcctcgccgagctgcgagccgcgcgccggcgtctgctcggcgatgcgcgcctccagacgctcgatctccaggcgctcgcgctcgttctgcttgagcttggcggcggcggacgcggctgcggcctcctcgtcctgcacgggagcggcattcggccggctgtgggcctggcggaacgcgcgcgaggccatggcaacggacgaactgggtggacaggtgaagtgacgttgaccttttgagttctggagctcttcgaatggctggaaaagggctgtattcgatgtaccaaataggtggtacactttgaaaatgtagccatgtgacgaggcagccagcccgattgtcgaagtgggcggttatttgatcattgggcagctatggcggacgaccaggtgaagctggtgcgtgtgcctgtgcgagagctgacgacggccatggacggcgccagggcggcgctggatgagaaccgccggctggctgcggagctcgcgcagtccgaagaggaggccagggagctcgagatcaagctgctcaagcgacagcaccagcccgactgctgcacaggcgctcgcgcggagcaccgtccgtatcgaccgggagacctgctcaaccctgcgtcgcctaagcggatgcgaccgaagagtgagatgtttggcacaagcatgcgcaacctcatcggagagcaggcggagacaatgaaccagctcgctgagcgagaggagaacgtacgttgaacatataaccaccgtgccctgttgatatcactcaggattgctcttgattttgcagctccgtgcgctgatggacgccatgcgcgaggtctcgcaggcgtcggacagtctggacattgtgagcaatgcgcttcgagctgcgcaacatgtgctccctgccgagaagtacacggtcggcatcctcagcgagaagaaggaccgcgtggacttgtactcaaaccctcccatggatttgcacggcaaacgctaccttactgaagagggcagtgtgcttgtcgactcggccacaacgtttgggcgcgttgtcctggtgagattttgttttgccatttcctaagggactgcttggctcactgatcgctttgtactgtgtccgtgttgttgatggagtgtagactgggaggcctctcgaggtggcggatgtcagcggttccgaagtcgtcgatgtcttcgaagagcaaatggagctcttggagtttgagcccgaggcgttgctctgcgcgcccatcttcaacgtccacggcattttggtcggcgtcttccaagtcatcactcgcaaacagctcccagagctcggcctcctgccagctccagctcctccaccagaacctctgtggttttcttcaactcctcggtccgacttgacaaaacttgggcaaaaccaggaaaaccaagagaaagcagcgtttgacccacgcgacaaggagagcttcgactacatttgcgtcactgctggcacggcgctgtggaatctgtcgctggccaaggcgcaccaggccatgcagagccgcatcgagtgtcttctgaagctcaatcggaacatcgctgctgagctcagttcgtcggccgtgcttcaccagatcatcgccgtatcgtacgagctgcttcgcgcagagcatatcgctctctatgtgcgagacgaaggcacggaagagtttttcctcttcgtcaccgagtacagggacgcgtcgaaaggtaaaaccaaagcgaaggacaagccaaatgaaaggccacaccactctcacctccggcatggcgggtatgacgaggcattcttgaaagcgcacaacggtatcgtaggtgtcgttatgcggaccggacaacttgtgctcacaaactccgcaccaacccatctcgccttcgacccgaagttcgacgagctgtggacgtcgctcaagacgaagcaggtgctttgtgctccagttaaagatgccggcggacatgtcttggccgtggtttgcgccactaacaaggtagacggcgacgagtttacttccgacgacgcgctgtacctgaactacgccgcggaggccgcaggaatctcgctgcacaagtccaatttactccgttcagtgctgatgtcgcagcgcttgacagaagcgcggctgcaactcgccgacttcgtgaataataacggtgagcgcgcttacagtccgtcgggagctgaagacgaaacaagcgccgcagcctccgttgctagattcgtccgcgtggtcatggcagaaggtaaaaagcttatgcactgcgaccgcttcggcttcttgctcgtggacccgctgaagaaagagctctggatcatccaagaagatggagaaagcgtgaggatgccgctcacgaatggactctctggactgatcgccactaccgggaggtcgatatgcacgcgcgacgcatacactcacccacactttgatccaacgctggatcgaaagacggggtaccgcaccacaaccgtgttggggatgcccgtgttcgaggatcacacgcccaccaaccccaaaatcgtggcagtagtgatggctatcaacaagaaagacgacaacgacgacgaggccaacaacgcgaagaccgacgacgacgacgcgccccctgtgacgagacagcacgtacctttcactaccagcgacgcggattgcatgacccagtactgtcgggagatccaattcgcgctcggtcgattgtctctagacatttcgtactacaaggtggtgtcggactgcggcctcgggacacccggtgagtctctgaccgaatctaccgatccatcaaaaacgcaggaccagccagcagttgacgatttgaacgaaccggaaatcatctcgtcaatcgtgcagaagttctgccagtctagtgagctcgacgtgcttgaagaggtagcagctgcagccatcgctgatgatcctgacgacgtggaagacgcggatgaagcaggcgggggcgactacgatgattgtgacggcgacacagacgacgaggaagaacagccaacaccattcgccgcgattccgtttccacagcggcttcctcagcgacgaatttcaactgcacgcgagagcggacacgtgatcggcgttggcgacgtcacccggtgggacttctcctgcttggatctatccaaccccgatatattcgcagcgacgtcagtgctctttcggtcgcttgggctgttggaacgcttccaggttgcccaggaaacattctccacgttcctctctcacgtggcctcgcactaccgccccaacgcgtttcataatctccaacacgccttccaagtaacacacgcaacttactgcctgttgcgtcgatcaggggtagcgaactcgtacttcgctcgggtggaagttttcgcaatgctggtagctgcgctgtgccacgacttggatcacccaggcaacacgaacgactttgaggtcaaggcgcacagccagctcgcacttacgcacaacgacgatgctgtacttgagcgtcaccattgccgcgtggccttcgttatcttgagccatccgggagcaaaccttctggcacgattgccctcgcgcgcctgcttcgtgtatgtgcgtcgactgctcatccactgcattctcgcgacagatatggcaaagcacttcgaaaagtgcaaggccctggaagggctctccaaacgccaccttcttgttaacagcgacgggggcagaggtgcgagacgaagtcgaagcaaacatcgcttcgtattcatggcaatcatcatccacgcagccgacttgtctggccaggccctgccgtacacgcaggcagtccgttggggcatgcgcgtgctctcggaattccagcagcaagcgaagaacgaagccgaaatgcacgttccggttgagtcgttcatgaccaatctgcaccacgccaagacacgggtcaccgtacagctcaactttatcaactatgtcctgcgcccgatctggctgccgctggccaccttgtgtcctgccattcgggtctatgctgactcactggaaagcaatcgagagcgctacaaggctgagctggacaagctccagcgtgaagcagaggaaattgaagagctggcgagggtttacgtgcgcggtaacagctcacgcagcttggttgaacactcttcaagcacaagacggctttccagtttatcccaaaagaattagatgaaagaaacacaaagttagagattaatgagcatattgagttttcaacactctggttgcatccatcggcgcactccttcacgaattcatcctcggcgagacaaaacttgagtgcttttggtgctaacgatagcaacaacgttgctctgatccatcaacacatcctcgacagcacggccgcgagcattcgagagcaaatcagacagcaggctctccacttcctcctctgcttccccggccaccacaatgtgcatgagtgtgctgcgaaggaactcggcgtccagctgaatctgctgcaacccgaacttggacaactctagctgccgaacccactcgctgaaggccttgatgcacattttgagcatcgtctggacaaacgaatccgcagtgagctctaactgggacgggaaaatgtggatcttacgcgcgaaaatccgatccacatcaagctgcatccctgaggatgctgctgtaacgccagcatttcgagaacggagcgcactggcgcaccgacggaagtcgcggcttgtcgtgcggctgttgttcccaatgaacacgctttgttcatcaccaagtgctagtgcaatttctttgccaaagcggaaggtggactgcacgaccgctgccatcatctcctgcacacttctcggctcttcgtccatatcagcccatgatgtggcaacaactccattgtggacgataacgcacaactggttgccatattgcttcgcaacgtgctgcaacaactctccagcagactcacgggtcacttcgatcatgtgcgttacgtcctgctggcgcatgcgattactgcgaatcgggtcaccagcaggagtcttggatggagacagaggtgctggcagacactcgatgaggccgcgtacgcactccccgatgccttcagctgagagatcttggcacatacaggctaggaacagcaagaactggggtgtgggctccagccacggaagcgctatgttgtcttgctcttcgccccgagctccgagttgtccatccgtttgtgcgaatgcgcgctttggctccgcatactggagtactgatgcattaaaccacttcaggaagtcataaaattgactctgcaaagatgttgaacggaatcgtcatatcatcatacttgttagcaatgaaattgtttcgcgtgagcagcaaagagggatataccttacctggaccaagtcggagaaaagtctgctcatctccgaaagaatcgcaaaccctgtttgcaccatgggctccatttgctgcagcaccttctgcatcatgtcggtaaacgtccttgcggattcgtgcgctagaggctgaacactttgcccaccatcgcgtgagctacgagccaacccagacacatcctcgtgcgaagtgacaaagagctctccagtatcttcgcgtaatttccgaaatacgccatcaatctggaaccgcacgcagctctcgacggtttcagtagcgtttgcagcgagaccgcacatcgggatcgttctgtccacatctttcacttgcgaaacaaagtatttcatcacacgcatgaagacaaaatactcgctatcgacaatatctgccgagagatcgtcatcctgcagcatgtcgaggacttcttccgtcgaaccctgtacaaagcatgaactgtcattagcgttggtgtcccaagaatataaggcagcaaagtgtacttacgaagtccgaatgagggcgacggaactgttcaacacactcgcccagatacagcccgaacaactctttcacaaagctgaggaacaagtcgtctcggacagcatcagaagatcttcgtaatggcgatgatttctcgcgcgccacgacttcaggcatgaagtgggtcttgtatactgagaatactcgagccatcttcgccaggacgtcttcattgaatctccgcagaaaagcaagcaccgaatcgctagtgcctcgagcctgtaaatacgcagcacaataataccgtaagaccatggacgcaagcacacactagtagaagccttatgtaccttaaagaccgctacctcgcgctcaaaatacgcttggtgccactcaagaaactggtctcggatctcgtcgctgcacgcatctaactgatgcaacagcactaccgtctcacacagctacgcaaaccagggcacatgctccatcaatgacatgataacaactacccgccatacataagcatgcagttacctcttcggacccaagcgttcggtcaagcattcgcttcttcagcagacgctcaagttgctgcatgattttctcggcctccatttgaatcgtctacggcaaatacaacaatgtcagcgcggatccagtcgagctcttcttccacatcaagcctcaccttgaacgacgagatatgttcatatcttcccagaattcggcgtgcaagcagataatacttggtagcatttgcgtactccttctgcttcacagcactacaacaacaccctcatcgtcagctcctgtcttcgcctccaacactcctttccttcagcacttacgtattcaatctctgcggcagctcgaagatgaattcgaatctcttcagcaaccgtcgtacgccaatgagcttctccaccttggagcgatgcggggccagcgccacattgatgctctcgctcttggccgtgatggtgtccatgctcttcaccacgcgacccacttcctcctccatactcgccacattgttctgcagcattagaaatacataaaatagcattaaaaacgacatagttaagccggcaacccgctctgaaaagctgcatgctggatattgtgggcaccttcatcttgcggatcgtgtcggtggcgctgatgaacttgttgtagttctcgtacacgagcatctgcatgttggtgtccagctccttgatctcgcgaatcaactggtcgtccgtcgtgagcagctcattgagtccgcggttctcgagaagctcctgcagatacgagggtacgcagggggttacatattcaggaatacacgtggccttcctctctagccaagcgccgaccttgacgtagactttggggtcgaagcccggcgagtcgatgttgcgcagctgctcctgcttgctctcctggtcctgcagcccgtagtagctgctcagcagctcctgcatgcgggacatgccgtggtcctccgaagacatcgcgatcctcaacgtagtaagtatgaatctaaaacagtaactcgtcatattgtagtataccaaataataaaatactatagtacacgtatcaaaattactattgttagtttcataatactagtactactgaaccggctcagaggtctaccggtatttatttacacagccgtgctttgcacggggaagctctggtttttcgattcttttttttcattttttatttacatgtattgtgctttgcaggcttttggcacttcggactgtaacttgtacgacttatcgagcacgacttattgataaatcgtactcgagtacgaattgcagaagtcgtggatggtcaatcagcactaagtagtgcgcatacgccatctcctgaatgatttagcacatccagcaccttttggcaattttagaaagtgccatttccgaaccaaaccgggttcgagactcgacttagcaactcgcatccaaggccactatgatttaccgctaagtgcgaacactaaagtagtgcactacatactggatgcaaagcacaatacttgggctgtctacagggccgctcgcttgatatgggtcgtgatgttttgatgaacgtttacagatacagtattgccccacttgtgttattcactaaacttcgtcttcaatatattaaataaagtaaaatggattgtagttttcatcaagcgcacgtcgtttgtagtaggtggcggctttcttgatcgacgtctttggcaaagactctttgctcaatgaggccacccagtttcgccggttgtgccttgtcgatcgtttagattgctcgtaggtgatcctctttccgcgcaaactgattatcacgcggtgtttgaggtgtaaaccactcactaccaataggaacaaaccggagagcacgccaagcaaggtatcaatcattaaacatggtattgacttgacatggtgttccgctgagtttcgactcgtcgatcttaatatttaaagggttaacgcgagactctgatttgtttaacacaatgatataaaacatatcatggttattgttaatctattggaagggtgggggcgtcggcctgtatagtacaggttgtagtgaaggctccactgcagcgtgttcatttacaatacaactcatcagagcaacgcgattgagatcctccaacactagtcattgggcgaaagccccatgatggcgagcttacttgcagtgtttccggcatccttgacatggtgttccgctgagtttcgactcgtcgatcttaatatttaaagggttaacgcgagactctgatttgtttaacacaatgatataaaacatatcatggttattgttaatctattggaagggtgggggcgtcggcctgtatagtacaggttgtagtgaaggctccactgcagcgtgttcatttacaatacaactcatcagagcaacgcgattgagatcctccaacactagtcattgggcgaaagccccatgatggcgagcttacttgcagtgtttccggcatccttgccgctcaattttttacatgagggcacgctagcaaaatgcacgtatatattggtgtgctgatgaggcattcatctcacttatatcacgttctgctatttgcttccacagtttagcaaagatcctgctacggtttccgaattcgtttcctttggtacgtagacctctagtatttaatactatggtatgtgatattacaggtacatatggttgttgctcgagtgagtgagtttaatgaccatgattatgttcgatgtgtattgaggcacaagcaacattcagttttgtcgtgaaatgattgcgtcggtttaacgcaaacataaatcttttatggtgctatcatttcaaaattggtagggtttttgggattcacccaattggattttcgagtctttttttcattttttatttacacgtattgtgctttgcaggcttttggcacttcggactgtaacttgtacgacttatcgagcacgacttattgataaatcgtactcgagtacgaattgcagaagtcgtggatggtcaatcagcactaagtagtgcgcatacgccatctcctgaatgatttagcacatccagcaccttttggcaattttagaaagtgccatttccgaaccaaaccgggttcgagactcgacttagcaactcgcatccaaggccactatgatttaccgctaagtgcgaacactaaagtagtgcactacatactggatgcaaagcacaatacttgggctgtctacagggccgctcgcttgatatgggtcgtgatgttttgatgaacgtttacagatacagtattgccccacttgtgttattcactaaacttcgtcttcaatatattaaataaagtaaaatggattgtagctttcatcaagcgcacgtcgtttgtagtaggtggcggctttcttgatcgacgtctttggcaaagactctttgctcaatgaggccacccagtttcgccggttgtgccttgtcgatcgtttagattgctcgtaggtgatcctctttccgcgcaaactgattatcacgcggtgtttgaggtgtaaaccactcactaccaataggaacaaaccggagagcacgccaagcaaggtatcaatcattaaacatggtattgacttgacatggtgttccgctgagtttcgactcgtcgatcttaatatttaaagggttaacgcgagactctgatttgtttaacacaatgatataaaacatatcatggttattgttaatctattggaagggtgggggcgtcggcctgtatagtacaggttgtagtgaaggctccactgcagcgtgttcatttacaatacaactcatcagagcaacgcgattgagatcctccaacactagtcattgggcgaaagccccatgatggcgagcttacttgcagtgtttccggcatccttgccgctcaattttttacatgagggcacgctagcaaaatgcacgtatatattggtgtgctgatgaggcattcatctcacttatatcacgttctgctatttgcttccacagtttagcaaagatcctgctacggtttccgaattcgtttcctttggtacgtactacaatcccttttactttatttaatatattgaagacgaagtttagtgaataacacaagtggggcaatactgtatctgtaaacgttcatcaaaacatcacgacccatatcaagcgagcggcgctgtagacagcccaagtattgtgctttgcatccagtatgtagtgcactactttagtgttcgcacttagcggtaaatcatagtggccttggatgcgagttgctaagtcgagtctcgaacccggtttggttcggaaatggcactttctaaaattgccaaaaggtgctggatgtgctaaatcattcaggagatggcgtatgcgcactacttagtgctgattgaccatccacgacttctgcaattcgcactcgagtacgatttatcaataagtcgtgctcgataagtcgtacaagttacagtccgaagtgtcaaaagcctgcaaagcacaatacgtgtaaataaaaaatgaaaaaaagactcgaaaatccaattgggtgggtaaaagatttatgtttgcgttaaaccgacgcaatcatttcacgacaaaactgaatgttgcttgtgcctcaatacacatcgaacataatcatggtcattaaactcactcacttgagcaacaaccatatgtacctgtaatatcacataccatagtattaaatactagaggtctacgtaccaaaggaaacgaattcggaaaccgtagcaggatctttgctaaactgtggaagcaaatagcagaacgtgatataagtgagatgaatgcctcatcagcacaccaatatatacgtgcattttgctagcgtgccctcatgtaaaaatttgagcagcaaggatgccggaaacactgcaagtaagctcgccatcatggggctttcgcccaatgactagtgttggaggatctcaatcgcgttgctctgatgagttgtattgtaaatgaacacgctgcagtggagccttcactacaacctgtactatacaggccgacgcccccacccttccaatagattaacaataaccatgatatgttttatatcattgtgttaaacaaatcagagtctcgcgttaaccctttaaatattaagatcgacgagtcgaaactcagcggaacaccatgtcaagtcaataccatgtttaatgattgataccttgcttggcgtgctctccggtttgttcctattggtagtgagtggtttacacctcaaacaccgcgtgatgatcagtttgcgcggaaagaggatcacctacgagcaatctaaacgatcgacaaggcacaaccggcgaaactgggtggcctcattgagcaaagagtctttgccaaagacgtcgatcaagaaagccgccacctactacaaatgacgtgcgcttgatgaaaactacaatcccttttactttatttaatatattgaagacgaagtttagtgaataacacaagtggggcaatactgtatctgtaaacgttcatcaaaacatcacgacccatatcaagcgagcggccctgtagacagcccaagtattgtgctttgcatccagtatgtagtgcactactttagtgttcgcacttagcggtaaatcatagtggccttggatgcgagttgctaagtcgagtctcgaacccggtttggttcggaaatggcactttctaaaattgccaaaaggtgctggatgtgctaaatcattcaggagatggcgtatgcgcactacttagtgctgattgaccatccacgacttctgcaattcgtactcgagtacgatttatcaataagtcgtgctcgataagtcgtacaagttacagtccgaagtgccaaaagcctgcaaagcacaatacatgtaaataaaaaatgaaaaaaagactcgaaaatccaataccatgtttaatgattgataccttgcttggcgtgctctccggtttgttcctattggtagtgagtggtttacacctcaaacaccgcgtgatgatcagtttgcgcggaaagaggatcacctacgagcaatctaaacgatcgacaaggcacaaccggcgaaactgggtggcctcattgagcaaagagtctttgccaaagacgtcgatcaagaaagccgccacctactacaaatgacgtgcgcttgatgaaaactacaatcccttttactttatttaatatattgaagacgaagtttagtgaataacacaagtggggcaatactgtatctgtaaacgttcatcaaaacatcacgacccatatcaagcgagcggccctgtagacagcccaagtattgtgctttgcatccagtatgtagtgcactactttagtgttcgcacttagcggtaaatcatagtggccttggatgcgagttgctaagtcgagtctcgaacccggtttggttcggaaatggcactttctaaaattgccaaaaggtgctggatgtgctaaatcattcaggagatggcgtatgcgcactacttagtgctgattgaccatccacgacttctgcaattcgtactcgagtacgatttatcaataagtcgtgctcgataagtcgtacaagttacagtccgaagtgccaaaagcctgcaaagcacaatacgtgtaaataaaaaatgaaaaaaagactcgaaaatccaattgggtgaatcccaaaaaccctaccaattttgaaatgatagcaccataaaagatttatgtttgcgttaaaccgacgcaatcatttcacgacaaaactgaatgttgcttgtgcctcaatacacatcgaacataatcatggtcattaaactcactcacttgagcaacaaccatatgtacctgtaatatcacataccatagtattaaatactagaggtctacgtaccaaaggaaacgaattcggaaaccgtagcaggatctttgctaaactgtggaagcaaatagcagaacgtgatataagtgagatgaatgcctcatcagcacaccaatatatacgtgcattttgctagcgtgccctcatgtaaaaatttgagcagcaaggatgccggaaacactgcaagtaagctcgccatcatggggctttcgcccaatgactagtgttggaggatctcaatcgcgttgctctgatgagttgtattgtaaatgaacacgctgcagtggagccttcactacaacctgtactatacaggccgacgcccccacccttccaatagattaacaataaccatgatatgttttatatcattgtgttaaacaaatcagagtctcgcgttaaccctttaaatattaagatcgacgagtcgaaactcagcggaacaccatgtcaagtcaataccatgtttaatgattgataccttgcttggcgtgctctccggtttgttcctattggtagtgagtggtttacacctcaaacaccgcgtgatgatcagtttgcgcggaaagaggatcacctacgagcaatctaaacgatcgacaaggcacaaccggcgaaactgggtggcctcattgagcaaagagtctttgccaaagacgtcgatcaagaaagccgccacctactacaaatgacgtgcgcttgatgaaaactacaatcccttttactttatttaatatattgaagacgaagtttagtgaataacacaagtggggcaatactgtatctgtaaacgttcatcaaaacatcacgacccatatcaagcgagcggccctgtagactgcccaagtattgtgctttgcatccagtatgtagtgcactactttagtgttcgcacttagcggtaaatcatagtggccttggatgcgagttgctaagtcgagtctcgaacccggtttggttcggaaatggcactttctaaaattgccaaaaggtgctggatgtgctaaatcattcaggagatggcgtatgcgcactacttagtgctgattgaccatccacgacttctgcaattcgtactcgagtacgatttatcaataagtcgtgctcgataagtcgtacaagttacagtccgaagtgccaaaagcctgcaaagcacaatacatgtaaataaaaaatgaaaaaaagactcgaaaatccaattgggtgggactgggccagtgggacgcacctcatggagactgcccagcacgccggcctcacgccgaaaacacccgggcagtggtacgcttacgcgcgtgacatctactcggcggaactactgcgttgcgacacgtattaaccaaacatgaacagagtattgggcacttattgaagcgcacgccgacaaccatcttcccgacagactgattgagcaggagacgattttgtaagttttggagttgatatgcccaggaattcccgatatttccccccctcgtcgcacgtcaggcggtcgtattaggcaagaacatgctgctaggtgcaaatcggtggattttaaggctctcatcggaatgatggaaaacagtggtggctgggtcaatttactgtcggatgtgtggcatagcatttttaagcagcacctgctcggctgccggcatgcgggccgacgtcaattgcacgggcatatggaacgacgagatcttgttggaccatgccaagcatttcgtaggaggaacttatagacgacctcgggacagtgcaagtagactttatcgcggattggagcgcctatatggcgttgcggggcgactaagttgggctggtggatgcatcctacttggaatctaccaaaaacggtagcacctaccccggggagtttgagctctattctgcttccaagctgcacaactgaaacataaagatcaagcccctcagcaccgactgcaaggtagtatcgagattcgtgtatacatcgcgatgtcggtatacggctactttctttagacagagcgtaaatcctgcaatacgtacatggtttttcactgaaaacgaaaatagtatgggtatttggtgatatttgtaacaaaatgccaaaaccctcggtatacaacacaaccatcgagggaaaaaaaggcccatacgttacacactcgatgtgaactgcacacaggcggcctcaaactccaaccagcagtgtagtatggtcatgtctttgccactgggctagattttaggatccactataacaatcttcaaagattgtaaaaaaaatcgttgcataacgcctaggcgctctattccttaagtgttgcaatcagggcagccgaaaaataaattgacgctcaagtaatcgccataaatattgttgcatacttcatgagcggctgtcgagaccataccattatctatgacaaattactattttgcgctcataatttatgatactctctcaaaatcatacaagctatactatacgagcgtagtactagctctaagcaccattgtgcaactttcaacggtacaagaacctcctcactttaacaagtatttatgcaacggattgtgtatacaagtcctgatgacaacacgttgtatacttttaaaaagaaaccctgttgtatatttatgcttagtagagtatactatgtagccgtgagcagtgtagctatttaggccttgtacttgcgcttaataccgatgaccagtccatggaaggactcgcttgtcttcgtcttcctggaccggtcgaagtaccacgagcgccataagcactcgtccaagaatctcggcaccttggccttcttcatgccccgctcgctcatcatctgagccttcagcgctacctcccaaacgccctcaatccggtttgtacacgcaccaatgcgtagatcctgaagcgttttgtatggtcaccccctgatgcgtgtaccgcataccagagagctacttgttgttttttcaacggtatacagcgcccccttgcggcggccggtgagcacctcggtgacgtacaacttgaattgatctgacaatcaaagtactataacgtagataattcgtatcagtgtgtaattagaaacaataacatccacagtaccctggcttggtgtaggtcttgatgtaattgagagagataaggtcatcgtagcccacctacgcgaaccatttctatgtcgcccggtcacgccgtcaaaaacccagaaactaagatgcttcttaccacgcttgcatttttgcttccttttcatgcccgcttcgtctacaccacgctcacgggtggttcagtaaagtactggaaggtgtcgtagaggacaccgctgcatgccgaaagccccatgatggcgagcttacttgcagtgtttccggcatccttgccgctcaattttttacatgagggcacgctagcaaaatgcacgtatatattggtgtgctgatgaggcattcatctcacttatatcacgttctgctatttgctttcacagtttagcaaagatcctgctacggtttccgaattcgtttcctttggtacgtagacctctagtatttaatactatggtatgtgatattacaggtacatatggttgttgctcgagtgagtgagtttaatgaccatgattatgttcgatgtgtattgaggcacaagcaacattcagttttgtcgtgaaatgattgcgtcggtttaacgcaaacataaatcttttatggtgctatcatttcaaaattggtaggggttttgggattcacccaattggattttcgagtctttttttcattttttatttacacgtattgtgctttgcaggcttttggcacttcggactgtaacttgtacgacttatcgagcacgacttattgataaatcgtactcgagtacgaattgcagaagtcgtggatggtcaatcagcactaagtagtgcgcatacgccatctcctgaatgatttagcacatccagcaccttttggcaattttagaaagtgccatttccgaaccaaaccgggttcgagactcgacttagcaactcgcatccaaggccactatgatttaccgctaagtgcgaacactaaagtagtgcactacatactggatgcaaagcacaatacttgggctgtctacagggccgctcgcttgatatgggtcgtgatgttttgatgaacgtttacagatacagtattgccccacttgtgttattcactaaacttcgtcttcaatatattaaataaagtaaaagggattgtagctttcatcaagcgcacgtcgtttgtagtaggtggcggctttcttgatcgacgtctttggcaaagactctttgctcaatgaggccacccagtttcgccggttgtgccttgtcgatcgtttagattgctcgtaggtgatcctctttccgcgcaaactgattatcacgcggtgtttgaggtgtaaaccactcactaccaataggaacaaaccggagagcacgccaagcaaggtatcaatcattaaacatggtattgacttgacatggtgttccgctgagtttcgactcgtcgatcttaatatttaaagggttaacgcgagactctgatttgtttaacacaatgatataaaacatatcatggttattgttaatctattggaagggtgggggcgtcggcctgtatagtacaggttgtagtgaaggctccactgcagcgtgttcatttacaatacaactcatcagagcaacgcgattgagatcctccaacactagtcattgggcgaaagccccatgatggcgagcttacttgcagtgtttccggcatccttgccgctcaattttttacatgagggcacgctagcaaaatgcacgtatatattggtgtgctgatgaggcattcatctcacttatatcacgttctgctatttgcttccacagtttagcaaagatcctgctacggtttccgaattcgtttcctttggtacgtagacctctagtatttaatactatggtatgtgatattacaggtacatatggttgttgctcgagtgagtgagtttaatgaccatgattatgttcgatgtgtattgaggcacaagcaacattcagttttgtcgtgaaatgattgcgtcggtttaacgcaaacataaatcttttatggtgctatcatttcaaaattggtaggggttttgggattcacccaattggattttcgagtctttttttcattttttatttacacgtattgtgctttgcaggcttttggcacttcggactgtaacttgtacgacttatcgagcacgacttattgataaatcgtactcgagtacgaattgcagaagtcgtggatggtcaatcagcactaagtagtgcgcatacgccatctcctgaatgatttagcacatccagcaccttttggcaattttagaaagtgccatttccgaaccaaaccgggttcgagactcgacttagcaactcgcatccaaggccactatgatttaccgctaagtgcgaacactaaagtagtgcactacatactggatgcaaagcacaatacttgggctgtctacagggccgctcgcttgatatgggtcgtgatgttttgatgaacgtttacagatacagtattgccccacttgtgttattcactaaacttcgtcttcaatatattaaataaagtaaaagggattgtagctttcatcaagcgcacgtcgtttgtagtaggtggcggctttcttgatcgacgtctttggcaaagactctttgctcaatgaggccacccagtttcgccggttgtgccttgtcgatcgtttagattgctcgtaggtgatcctctttccgcgcaaactgattatcacgcggtgtttgaggtgtaaaccactcactaccaataggaacaaaccggagagcacgccaagcaaggtatcaatcattaaacatggtattgacttgacatggtgttccgctgagtttcgactcgtcgatcttaatatttaaagggttaacgcgagactctgatttgtttaacacaatgatataaaacatatcatggttattgttaatctattggaagggtgggggcgtcggcctgtatagtacaggttgtagtgaaggctccactgcagcgtgttcatttacaatacaactcatcagagcaacgcgattgagatcctccaacactagtcattgggcgaaagccccatgatggcgagcttacttgcagtgtttccggcatccttgctgctcaaatttttacatgagggcacgctagcaaaatgcacgtatatattggtgtgctgatgaggcattcatctcacttatatcacgttctgctatttgcttccacagtttagcaaagatcctgctacggtttccgaattcgtttcctttggtacgtagacctctagtatttaatactatggtatgtgatattacaggtacatatggttgttgctcgagtgagtgagtttaatgaccatgattatgttcgatgtgtattgaggcacaagcaacattcagttttgtcgtgaaatgattgcgtcggtttaacgcaaacataaatcttttatggtgctatcatttcaaaattggtagggtttttggggtacttgcgcttaataccgatgaccagtccatggaaggactcgcttgtcttcgtcttcctggaccggtcgaagtaccacgagcgccataagcactcgtccaagaatctcggcaccttggccttcttcatgccccgctcgctcatcatctgagccttcagcgctacctcccaaacgccctcaatccggtttgtacacgcaccaatgcgtagatcctgaagcgttttgtatggtcaccccctgatgcgtgtaccgcataccagagagctacttgttgttttttcaacggtatacagcggccccttgcggcggccggtgagcacctcggtgacgtacaacttgaattgatctgacaatcaaagtactataacgtagataattcgtatcagtgtgtaattagaaacaataacatccacagtaccctggcttggtgtaggtcttgatgtaattgagagagataaggtcatcgtagcccacctacgcgaaccatttctatgtcgcccggtcacgccgtcaaaaacccagtaactaagatgcttcttaccacgcttgcatttttgcttccttttcatgcccgcttcgtctacaccacgctcacgggtggttcagtaaagtactggaaggtgtcgtagaggacaccgctgcatgccccaagagtggcgcacccatgcagcccacggcggcgcgttggcgctgtcacacggcgacatgttgcgtgtagcggggcgtgcgcaaagaattcgttcttcgtttgcttcacggcgcccctctccaacctcgtgaaggttctgttcttctgggccagtgggacgcacctcatggagactgcccagcacgccggcctcacgccgaaaacacccgggcagtggtacgcttacgcgcgtgacatctactcggcggaactactgcgttgcgacacgtattaaccaaacatgaacagagtattgggcacttattgaagcgcacgccgacaaccatcttcccgacagactgattgagcaggagacgattttgtaagttttggagttgatatgcccaggaattcccgatatttccccccctcgtcgcacgtcaggcggtcgtattaggcaagaacatgctgctaggtgcaaatcggtggattttgaggctctcatcggaatgatggaaaacagtggtggctgggtcaatttactgtaggatgtgtggcatagcatttttaagcagcacctgctcggctgccggcatgcgggccgacgtcaattgcacgggcatatggaacgacgagatcttgttggaccatgccaagcatttcgtgtgaggaacttatagacgacctcgggacagtgcaagtagactttatcgcggattggagcgcctatatggcgttgcggggcgactaagttgggctggtggatgcatcctacttggaatctaccaaaaacggtagcacctaccccggggagtttgagctctattctgcttccaagctgcacaactgaaacataaagatcaagcccctcagcaccgactgcaaggtagtatcgagattcgtgtatacatcgcgatgtcggtatacggctactttctttagacagagcgtaaatcctgcaatacgtacatggtttttcactgaaaacgaaaatagtatgggtatttggtgatatttgtaacaaaatgccaaaaccctcggtatacaacacaaccatcgagggaaaaaaaggcccatacgttacacactcgatgtgaactgcacacaggcggcctcaaactccaaccagcagtgtagtatggtcatgtctttgccactgggctagattttaggatccactataacaatcttcaaagattgtaaaaaaaatcgttgcataacgcctaggcgctctattccttaagtgttgcaatcagggcagccgaaaaataaattgacgctcaagtaatcgccataaatattgttgcatacttcatgagcggctgtcgagaccataccattatctatgacaaattactattttgcgctcataatttatgatactctctcaaaatcatacaagctatactatacgagcgtagtactagctctaagcaccattgtgcaactttcaacggtacaagaacctcctcactttaacaagtatttatgcaacggattgtgtatacaagtcctgatgacaacacgttgtatacttttaaaaagaaaccctgttgtatatttatgcttagtagagtatactatgtagccgtgagcagtgtagctatttaggccttgtacttgcgcttaataccgatgaccagtccatggaaggactcgcttgtcttcgtcttcctggaccggtcgaagtaccacgagcgccataagcactcgtccaagaatctcggcaccttggccttcttcatgccccgctcgctcatcatctgagccttcagcgctacctcccaaacgccctcaatccggtttgtacacgcaccaatgcgtagatcctgaagcgttttgtatggtcaccccctgatgcgtgtaccgcataccagagagctacttgttgttttttcaacggtatacagcggccccttgcggcggccggtgagcacctcggtgacgtacaacttgaattgatctgacaatcaaagtactataacgtagataattcgtatcagtgtgtaattagaaacaataacatccacagtaccctggcttggtgtaggtcttgatgtaattgagagagataaggtcatcgtagcccacctacgcgaaccatttctatgtcgcccggtcacgccgtcaaaaacccagtaactaagatgcttcttaccacgcttgcatttttgcttccttttcatgcccgcttcgtctacaccacgctcacgggtggttcagtaaagtactggaaggtgtcgtagaggacaccgctgcatgccccaagagtggtgcacccatgcaacccacggcggcgcgttggcgctgtcggcactaacacaatatcgccccgcatttacaaaatttcaaatttcaaaattgtctattaaaaattatggtgtcgcacttctagcagtaaaagccagaggcctcataaccaaagaagccccgcactccagcatgtcccgacgcacgccccgctcgatccactccacgtctcagtccccatccagccgcagcgcgcacgagtacgacgtctcctccaacacgccttttatgtttaacgccgttatgagcgcctgtgcaacggaaaagggcgcgttggagtgggctcagagagtcgggctcgtggccagcaaccccctgtgcccgtcgtgcgcgggggatatggcgctgtacgtcaccgtcaagcggagccggtggcgatgctcgcgcacgggctgccgcttggagcgaagcgtgcgtgcgtgcggggtccttcttcgcgcggtcgaaggcccccctgtccaagttgatcaagctgctcgtcttctgggcgtttcaacaccctgtcaccacggcagcccagcaagcggacgtgtcgcctacgaccgctggtcagtggtacgtgtacacacaggacatttgcactgctgggatgaagagatctctgctcaaggtttgttaatgcgataagttatttctcagttaataattcttttctaatgctgaaattgtttttaaaaattgaacactggtagattggagggccgggtcacgtcgtcgagatcgacgagacttcgttgaagtagaagcagaagtacagacgcggcgccctccaccccgacttctgggtgtttggtggggtggaccgcaccaccaagaagtggtttgctagggtcgtttacgaggatcgcaccaagcccactctgtctgcccttatcaaggctcatattaaacctcggtaagcattgatagtatgcgtgctagttttattattactgacaatgtgtgcgtgtttgatagtactctgatagtgtcggacatgttcaaggcgtatgccacgcaagttcagagcgggcggaacaagggcaagttctacacgctcacgaacaaccggcacttgcgtggcatgcgataccagcacctgtgggtaaaccacagcaaaaactttaaggaccccaccaccggcgcccacacgaaccgaattgagggcgtgtgggaggtcaaaattaagcagcacatcaaagctgcgcgcggcatgcgcaaaacggtggtggcggggtacctagatgagtgcatgtggcgaacctggtattttgctgaaaagccagcaaaaagtcatgtttttcagggcctagttactggcattagaagatactatgaggtataacgggatcaatacactgttgcgaacttaatcctaatagacaatgttgaaatttgaaactttgtaattgcggggcgatattgtgttagtgccgcgctgtcacacggcgacatgtcgcgtgtagcggggcgtgcgcaaagaattcgttcttcgcttgcttcacggcgcccctctccaacctcgtgaaggttctgttcttctgggccagtgggacgcacctcatggagactgcccagcacgccagcctcacgccgaaaacacccgggcagtggtacgcttacgcgcgtgacatctactcggcggaaatactgcgttgcgacacgtattaaccaaacatgaacagtgatccaacgtttctatttgtatgtaggtcggtggtgacggaccagttccagtcattggcttccgattccgggatgaacgtcttgttgaagctgcagcgtgttcgagacggtgtgacactctttatcaagcactagcgacttgatacggccaatgtatgcgaggaggccgacctgcatgcaccacgaaataactgccccttccgtggcgcacgcaggcatcacggcattgaacgtgtgagcctccgcgtcgacgctgaagtcgtacttgcctgacgccattgatgtgcagggggggctgagggggatgcgggagatcttttctaatacgcgctccgatggcgagcgcagagcgcgctttggtgcccgtgtgttattttgtaaatgtgatggatgggtatatgtaaagtattcatgtccggacatgcgtacacttgggaggatcatttacatttgtgccaattagtttatctcaaccatagagcagacccgggacaacacctgtacaacaatgcacactgtaaaagtgtgtgtattgttgggtatcggtgaatatgtctgattttactgcacggttctgggtttcttcatgatagccatgtgtcggtgtggatttcggcaccccgtacgtcatcgcgcttccccagtacgctaagtacacgccaaaccgatcgaagagttcagcaactttgcttctagatcgagtcgacaagctgtttcgtcaacgcccgagcactataccaggatttggaaacgaatgatgtttcagcgcttatacacaacctattcattacaagtcggatgtgtctacagtctgcacctcatggtcaatgtgatggggttttggtgtgtactaggatctttttccgcgtgacagcacgcaaggctacactttcaaaagagatgcaccgtacatcaacgttttgctattgctccggtcgagtacgacactaccgcccaccctaccgacctcctctccaactccccgtattatccatagatcagctcaatgtcgtccaacgcatttagaagttctttgttctttcccacgtcttcgtcgacatcctcgctttttttttcttcttcctcccacttctggaagcgcctgccgtacacatcatgcttcacaataatacaaatgaacctgccatatggaatgagtgaaaatccagcgcgcttaacagagtgctcgatgatagactgatcagtgtgcttttagggtctctgcacccagccagtatcaacttcaacactcggtgttcttgagttgctggcaggggtgtactgctggcaggggtgtacgccacctggtcaaagtttttccagttattcaaaagggcgcacatcaggtccttgaactacttgtaaagcccgatgtgaaagtaagccgttaacccatcgaagatggcacatatcgagatgtcgcgggaagctcacttttccttgacggccttggatatgtgggccagcatgctatcccatacaaacgtattttcacgagcctataacacagatagacacactcgacccagttgcaccgcagctttgagtccaccatcacttgggctggtaggcaatgtacatcccgtcaatcttggagagcttgcgggactcctatttgtgctttcagacgacaagagggggaagcttcacacccgttacaattgccgcgagaatcgtagtcactctcatcgatgcaaatccagttgggttgaggacaacatggcggctgccgcgtacttcaacgatctgcttacgggtatcttcgaagtataccgcattctcgcccaacatcactgtgtgctggcaattgtactttcacttttgctcaccgagaaaccgcatataccacacagctcgtcctaccagttggtcttcgtataacgtaggcaggttggtctgaagtcgaagagacaatttgtagcacttaatgaagaaactcacccggtgtgaataagcttgaaacttccgagttggtgtacgctatagagctgaagagcttgaatagcgatccactctcttgtcaccttctttttcttgagccgtctgaccgcaatcgcccccagcagtaggtcttcaaggtcgcccaacgacgggtaatgtttaccacccgaaagacgggggagtgcgttaatctagcctctgatatttttgccgtattttgggtgatgacatccaatgcgtcggtgcgaatatccttggtatccgcacccggtacgtcaaacattcatctagctcctccagtccactagcacgcaccaagctagtcgacgagttcgacaactgctgtccgtacaaaaacgtactcatactattgcgcggcgccttcggtgtacgtatcccaacgaaaggacgcgaatcaaattgcacccatccagcaccgaacgatgcgtccgggcccaagatcgcaacgcaaatacttcagtctccatcttccatcatcttcaagttgacctttctatcacatacatgtgtttttttacaacttttatctgtatgacgcacgtatgggtgtgagcgcatccatgctgccagctatcgtttgacatgggagagaagattacgtattgtaggttcaacccgtctcccaccatgaaccttcgtggtgaaagatttgaatttgagcacatatgttggtacccgaaagatggtgaactatgcctgagtagggtgaagccagggaaactctggtggaagctcgtagcgattctgacgtgcaaatcgatcgtcaaacttgggtataggggcgaaagactaatcgaaccatctagtagctggttccctccgaaatttccctcaggatagcagcaacttatttacgatagttttatactgggataggaagcgacgaagtgctgatagaccagcccaaacaggattaattcgggcaatgtccccccttctaatcgacaccggtgatgaaccggtaacgtctttaggtcaatttacagtaagtgatgtctattgaccgagtgttttagacttctcaagaatgatggaggctggtccagttcatttgcaaattcgtcgagttagattcgtcattgattttgctctgaaatcggttgtacgtcgtgaccatagtggcgatacattgtcgggcagattctgcggctgcgaagcaggcccaggagatgcccgtggagcgtgcggattgagtttatcaatggcgatcaaaggtgagttaaccaatcctatcccagccttcgcgaagccctagtgaggtaaagcgaatgattagaggattcggggaagcaacttcctcgacctattctcaaactttaaatctgtaagacctgcaggtttcttaattgaacttgtggatgtgaatatcaagttgctagtggtgcaacgcacgcgtttaattaagtatccatcatatattgaaatattataaaagcaaacttaatgggtcatttgaataattacctagtcggtctctatcgatgaggaagcatcaatcgcatcatcaagtttcattcgaatcatttcctattctcacgcagacgcaacatcaggacgaagttacagcacgaaggttagcatagttgtatgcttgggagggcgctgctgcaactaatagcttgcttgaatttggttattaacagcgcggaggtaagaaagtaaataccgtaactgtgttattgcactaaaaaaagtctgcttatctggtagttgtggatgttcataatataaaacgtgcagcgcgggcgactggtgcgcagcaactgcggcacgtctaagtcgtgtgcgctgtgcgcgtttatctgttcgttttgatttttgctatctcagcccccgcgaagccctagtattcgatttgggttgcgatagtagcactaacgttactttctatcctagtaaaacttacatgtaagcctcaaaacgcttaaagcggctatttgtgcgccaaagcggctatttgtgcgccaaagcagctattggggcgctaccttgaacggccacaaaagcggaaacccacgtcacttttctcaattgtagtgcttagcgcaacgtagtacagtagtacagtcaaacctgtttatatgatcctctctatttgagccatgccgtttatttgatgcaggctttgtcgctaccaaatatttcacttagtgtttgtatgatctctgtttatatgcatacaaggtatatgagtcacatttttggggaccaaattaggtctcacctgtttatttgattcacactgctcacggccacacactcttcaaagcaccactgctcaacactcaacgcctaccgcaagccttcttcgctcgccatgtctcctcgcacctgtctgacgctagaacaaaagctccaagtgcacctaaagcttaagcagaatcctggcatgaacaaccccatgctcgccgagtggatctacgcaactttcaaggcccgggtcagccgtgccacactcgcccgactgcgcaacctgccttcttcctacttcagccacgtcgacctgagtgcgaccaagcggcgccgagtgaaattccctcagttcgagcgggaactgagggattttttctttcagaacgaagctaaaacggcgatgacggacgacgtgctcctgctgaaggcgcatgagctggcggagcgcttaggaggaagaggaggaacaggaacccgcagttcaacctgccattgctctgagacactgcatggagctggctgcatttctgctgcaatgcggagagcagactgacagagaacgaagagctttacagaccgtgaccgctttggttcgagagactacggtgaaggcaaagcggcagcgaactatgcacgatttctttacgtgcaccacataatttttttatctgagtccattttatatgagtcattgtagtagatggtcaccaacagggcctcatataaacaggtttgactgtaatacactgttagtattattcagtattactaactgcgtataatttcattaaaatgatacgttcgaacaggttacgccaaccgtaaccgtggggctcaatctgtgtatcgtcacacacttccctttgatcgcagggagctacgccacgatggacgtgaagcggctgctgtgggaatccaagctggcggtggcgctgtgtctgctcatcatggcgcgttgtgtggaccgcgtgctctacacgtgcgtcttggccctaggaagttgaacccaccgatccgctatgatctttaacgctacgttgacattgatgtttgtagacgaatcacgtacgactacaccgagttcctctggtacttcacgaacgtgatcctgcccatcgccttcctcgtgtcctcggctcctgtggtggcgtacgtgcaacaaactggtctcaatacattggttgggggctaacctaacagtgtgtttgttgttgtggatccctcctagatacaagctctacttcacgggtgagcgcatgggaatgactccgtgagctcttgaggatgacaaattgacacgtttcttgttatttctgtagatgacattacaccggagatgcgtgagttcccgcactacaagtacatgctcatggcgctgttcgacacgctctacaacctgctgggcgcgttccccacgcctcacatcgggtgcgtcttcatgacgagtcgatgaatggtgttgtggtgactgattgtgcttttgttgctgtttgcagggggaacatggccaatgtgctgaaccagctgaatctgccgttcaacatgctgctgtcctacatgttcttgcagacacgtttcaagcgcggccacatcctgggctctatccttgtgctgtacggcggcatggtgaacatgattcctgtgcttacgggtcaggatagcgccaacaccccggacccaagcgctggttggatcatcctctacattgtgtccctggtgcccgcggcagcatcgaacgtctacaaggagatcggactcaaggacgtggatctggacatctggtacgccaacatttggatcagcttttaccagctgatcatcggcttcgccacgatctggaccgtgcgtatcaaggcgtttagcgacccgcctgtgccctggggtgacttcccgtcgtatgtggctaaggctcacgagtgcttcattggcaacgaggtcgagctgaatggggaggtgctgccctgtgactcgggtgtgctggaggtcttcctggtcttcatcgtgttcaacaccatgtacaaccagctcatgctgtacatcttcaaggaaggcagcagcgtgctgttcgtggtgtcatccgccgtgggtctcccgctcaccgacctgctgtacatgatcccgttgctcacgggcaagtttgctggccaggctttcactatttacgacggcttcgcgctgttcgtgctggtgatggggttgctcgtgtaccattcggagaaggaagagcgcaagcgcggcaccgagtcggtggagaagtcgcccatgtatgcgtcgccttcgttgcagaagacgcacctcatgcgcaagcgtcgtggcaaggtggtgtaccgtcagagtccgatgattcgccgcacgggaagtggcagcgatatctcgcagcggcttttgggccgcaatgccccgggcaagaacagcacgtacggcaccaatggcagcggcaacgctgcggcgcgccaaacgggcaatgatgggtattacccgtagggcgtgcgattcgtctgtgttgaagagctacacgatgtagctcatggtcctcttccttcgtctcgcatctcgcttaaatagagggttaaaaattggcaatgatccgctgttcgtttgatgtgggtagtgtttacaggtgtcgatccgaggtgacaattcggcctagagacgggaagtatcggtctcctttcttgtcgcggcgtgcctgtacgttcacgtaatgcccgaagcgatcagcttcctgtgagaagctatagtcgcaatcctcctctttaggatgctgcacgtcacccgctaccttcgagctgggtagcttccggggattcatggggccactagtcgaatcaaacaatggatcgagcataagattgtagacgggatcctggtttcgccgtttgggcttaggctttggcctcgtgaagacgtagtggtgatgaggatggggtgattcagacgaaagacttggcttgttgttaccggcaggtctcgtcgaggcgatgttgatcccgttcaagcttacgggcgacttcgagccaccgtcaagtacaaggattgaaggggcgacattcgacgtagcctctgaagtggctgcactgccttcgtccctcaaacacttagaccctctcgttaggcgatccccggagagttcatccaagctcccaactggagactgcggtagtgctggaaacgatgcactggtttggggttctttcctatgaactgggctagtcaccacacttgatcgattggagaccccttccttgaccccaacagcactggtgacgctcgatttgcgacgttgctcaagttgtcgctgttgccgctgctggtgctcattgatgaacgccatcgtctcccgagcaagctcaccgacagactttttgtcccgcaacgccatgggtttgttctgaagttccatcgcgaagtcgtagccgatctgcttcactcgctccataacgagtgttggtgttgccactgcacttttctcgcccttaccgggctttggcttatcatcggcagacgctcgatctggagcaaaacctctgacacttgacaaatacgcatggtactcaccgaacggatacgacgcaatggaacggatggtggttaccgcggagtactgcagtgattcgaggtaaggatttggatttccatcgaggcgaagtcgcgcaaggaacggaaacaataactcgacgataccaagcgccacaactcggggaatacacacgagcacgtcttggctcaaggcagcgatggcgctgactgcgtgaacaagtagtctccaccttttaacctcttctttcttcttcgcggatgatgacgcggtgccgacagtgagaacaaggtccttgtgctgctgcaaaacttttgtaagcagttctaacacgcggaagtgcaggaagagctcacttgtgctgccttcgacggcattcaccatggccaaatgcgcgataacgaccgcaatttcactcttgcattcatcgtcaaaggattttgaggttgggtgccgcagttgcatgcgcttcagcaggcgaggaagtacgtgggcacgcattatcccggttcgaccatcagctactgcacagagtttgccaaagagtgtgtacaatgcagcaggcacatccaaaagcccatgatcatcaacagaggcatcaaactcgacactttgcttcttcggcgatgactttccagttgtagtcgagatgaggatctctggtaggtggatcaacgctgtctgtaggcaaccttgagtgagcaataagctgcaagccgtgttggtgcaagccagccgactcaacgctacgcagcacgcactaacaaggtcaaagtcgatgcttttctcgcgtagaatgtgcaaaatggctggagcaacgagctcaaccaactgctgcagcttctcttgggcatattttccgtgcgggtggttagcgtgcgtcttcaaaaacttgtttcgcgagctttccccgtaaggcattgggcgaatgtgccccgccagctccactgcagcaacaaccttgcttaactcgacttcaggaaaatctgcggcgtcacaaggagttcggatgagcgcgattaagtcttccagcacatgcatccggaacatgacatcgcaaattaaagcttggggccactcgggaacttgtggggacgtgatagaaggccgaagtcgagcatctaccatgttactggggcacctcgccagtcgacttagcgccttacaggcttctttcgaccctagctgatgtatgaagcgatcctccgatgagctacgcgctaccaacccctcaatttcatcaagccgattgcactgaatggaaagtgcgaggtggttgatggtgtcctcggaaaagcatgcacgattcacgtgcgtggccttgcacatacgccccagcaagatgcagcttatgttgcgctggcgagagttctgcacgggtgactccatgcagctcggtgacacttgcgtcaaaaactgcacgatagtaggcagcgcgttcactgagaaaaagtaagctgccgtcttctctgatgcgcgcggggaagaatcatcttgcagcgccaactccaacacgagcgtgtaaaatgcatccagtcggtcttcgaaggttgcaagagcctctaacaacgaagtgacaggtttcacctgctcggtttgccttgctagtagagcgcaccctatcagcgccatgatgaaggccattcgcgactcggaagcttcaaagcttggtcggcaccagcgcaagaaaatttgcacggcgcccgcagtcgtaagtccatgcctggcgtcagtacggcttgtcatttcgtaaaataacgtcactgccgcttgaacaacaaccaagtttgggcctttcatgcacagtagaacttgttcaagccgtcgacctccacatctagtgagtgcgtcaaggagctgagagaaccccagtgaccgcgctagcagagttagaatctccagtacttgtgctcgcaatgaatcgtctttgtcgcgacagaagcgcaaaacctcgaaaagcgtgtcgagcacgtccgcagtcagcaggaactggcgcactgaagccttcagctttcgcatcaagaaggttcgctcctctggggttgctgcacgagagcgatctttagtaggagatcttcggagagggctagtgggggttgttgatacagcacttttgtgcccccactgctctgttgcatggagaacctttctcgaaatggagaatagcagattaagcgagctcgctagtgcagcgattgaggcagcggttttaccattgttcctcaattccatggtgcacgtcaagtcaagttgcaccctctgcacgacattgcactggagaatctcgagaatctgctcgtctccatgaccttcgacgatgtttgcaacaattcctttcaccagctcaataacttcgcggctctggcgtcgagtaattagtgatacgagacataccaacaagcccgaaccgaggatgcgtctctgatctgagagtacagtgttgcgagtcttgttcgaaatgccgtcggggtcacgctcaagcttcgccaaatggtacagtatagtgatgtacgcttgcgttacactacttggaattcctccggagccgacagcttctcgatacaccttgaactggtgccgcagctccacgagcttgatcatgtgcatggaacgcagacgcgttctcacaataggatcgtagtcgcgttgactcactgtgcgctcaaagagtactccgcgccagtggtgctggaggatacgcgcgcatagctcggtctcgcgtagcagacatccgatgctcttgttcgcagcgttttcacttgacagcacgtgtgcaaaccactcggccagcaccgctaccagtcgagccatgcggaatatcttggtattgttggtgagtttggagagtgtccggaatgccttgttggtcaacgttggtaaggatgtctcgacgtagtccacagcatctagtagcacagaaagcacaacaggacatcatcaatcgtgatgtctggtccctcctccactgcaccatgttaacgtaccgaccttcgtgagtctccatcaggcggaggagcattgtggtagcgagctcacgtcgtgaatcatcctcgcaatgctcaatctcctcgtaaagagtatccacggcagcctggatcttcgtagcattccacccgcgggtatcccattcttggtccatcagcatcgtcgcctacatatcaacagcatgcccaacgttgaatgcatgtccagtaccaaccacctttgtgctaacttacaatgcggccgtcggtcacaacggggtcttcctcctcttccgctcgatctggttcgcctcgatcttcttcatcgaagtctggagtgacttcagggaatcgacttggaattacgcgcttgggagacggcttcggactcggcgctggttcattcgtcttacgtgaccgctttgtcgtatcacgcaggatcaaaacacgccgccccacgtcctggaggtggtcgcttgctgccgggtccagcggtcggtcaagtgcgagtgtcgggagcaactgttcctgcatcgcgtacacacgcttggcctccgcgttcacctccacagtgcggtccaccgtggagccacgctcgtcttcccatgggtacgcctgctcatagggcaaagtcacctcacgtcgcttgccacggcgcgagttgcgctcgctcatgacggtcgaagactgcaaagctaatcaagacctgacggaaatagggtccgctaccactaaggcatgggcaccatggacaacgctggcagtttcatcaagacgatgtattgtttacatactcagctggcctgcacgccagcgcaatgcaatgttgcgctgtgggcgatatccgaagagctaccagtgacttgaagctggtagcactcacgcaaacatggaggttccatccctcaaacggcatcaagtgtgtgggtgtgggtgtatgagaggtatgagagggcacttacttgccgccgaagaacttgcgccagcccgaggtctccgggaacttgacgccgttctccgtgagcttgacgaaggccttggagaagtccttgaaccacagctcctcgtccttggcgtacatctcgacgtacttcttgaacttggggtcctggatcagcaccatgtcggcgggcagcatcatgagcttgcccgtggggtcctcgtactgcgtggggccgttccacttcttgatggtccacttgttctcgagcagctcgcggaagaactcgttcgagaacgtccactcggcgttagtccacgggccgctgtagccgctgcgcgtggggtagcagcggccgatggcgtgcgcgcccacgagcgccacgatgtcgcggtcgtcgaagcccatgcggtaaaagacgtcgcgcacgtgctgcgtggtcttgtccttgctgcccatgtcggcgttgggcaggcggtcgtcgggcgtctgcgtgggctccttgccgctcttggcgtcggggcggccgaggcggaaggggatctcggggccgcccatctcctcgatcatggccacgcccgccagcacgtacaggtcggcgtacgagatctccgggtggttcttcttgaccttctcgagggccttgacggccaggtgcaggccggcgttgccgccgtggttgatctccgggtcgaagcggatggtgccgcccgtggagccgccgctgttgtccaccttgctgtagctgcccgacgagtgccacgcgaggcgcacgagcgtggggcccatgtagttgtcgtcgtcgaagatctcgacgatctccttcttgatggcgtcgatgtccacgggcttctcgcgcgcgttcaccaggtcggtgagcgccaggccgctcacggccgcgacgccggcggcggccagcacgatggcgctcggctgcttgttcttgttggcggcgcggaactgcgacgtggcgaggccgcgcgtcttggcggcggacgcctgctgggcggcgcggagggcggcacgacggaacatggcggcgaagaggagggggggcttcggtgcgcttgggggcttggcggaagatctggaagtgagtgaggggcatctacaagagcaaccattgcgaaccacctacccgggtcggacatcgcctctcaaagggcgcataaaactgatcttcggataggatggggtagagtgatttcgcaaggaatcgatagatagaggtataattgtgatggtctaagcatttgatcggttttgattatgacctcgggtattacgggttattaaaatcatcagatcggcgggaatgattactaaagatcgctgttctgggggtccaggcacattgacatactggcggtgcgggccaaggatcagggctgtaggttgcaaccggaagttaagcctggggctctccttcgccatgcggcgacgacgatatcttctggaggtgaggcttgttcgtattggtgaagccggtatagctttgtccgtcctggatggctgccacctcgaccgataacccttttttaggggtctaaaaaggggatcctttcagcctccaacttcaagtacgtggcgggatgctgccgtgctaccattgtggcctaccaaaggcatatgggctgccttgcactcttctcttaagaattcgccgtcgtccgcagaagtgttttcgtcgccgacgtcgcagctctacgaggatgcacgctaatctgccgcgttgcgccagttcgacgagctccagcgttgcgccgcagggtgtttaccggtgtcaacaagaggcgaggacgtgagatccacgcagtacctgttctttcgagagagcagcgcatgtacgtccacggcaccactgcgatgactctccgccggatcggcagctggagctcgagacgatgccatcagctcagatccccataattcggcctggcgctttgaacggtggccgtaccagtaacccatttgtggcaaccaagtccagcgttgcgtcatgatcaccaataccttcttcagcgctatacaagcaagaaacgctgcttcggctagtcgcgtaacggctcgtatttcccacaaccattgctggcgcgacgatggcctccacggagagcggcaggatggttttcgtgccggtcgatgcactgagaactgtcgtgcacggcgtccgcgagcaggctgccgagaagcagcgcctactcgcccggatcgaggagagtcgcaagcgtgtgcagttgctgcgcagcaggtcgacagcggtggagtcgaagctgctggagcatcgccagagtgccgttgtgcacagcggtaaaatcgttatatctcccaaggggatcgggccgaaaggaactgtcaacctgcaggcgatgacacctccaaatgctgcagcagcaggaggaggagaccaggtttcaggcggcatcctgacgatgcagaagcgggtttcgcagctggagacgctcatgacactggcgaaagaggtttccgcgcagagcagtttcgatagcgtgatcgagcgtacgctgcgagccgcactgcagttggtgcacgctgacaagttcacactgggcatcctgcacgagcgtcgaaatgtcctggacatcttctccatttaccgcgaccctgacgccgacatcgacttagcgttcaccaaggtgaatgtcatcaacgaaggcttcgttgtgcccgactcccccaccgtgttcggccgcgtggtcatgaccggacggccctttgcgatcgatgactccgacacgcacacaattttcttaagtcaacggagcagggacaacgtagaccacggcggcgtggtcactccccatgccttgctctgtctacctatccgcaacgcccatcgcgctgttgttggtgtattgcaggtggtatctgcaagcaaggcatcgtcgtcgattgcctctgcttcgaaagcgaccccagcatccttcaccgatccagatatcgccaatctggagttcattgctatcgttgccggcgcaacgatctggaacctcgtgctctcgcgtcagcggcagactgcccagcaccgaatcgaagggcttctcaagctccaccgcaacatttcaatggagagcgtgtcttcctctgcagtgctggaccaagtgctcgctgtttgccacgagcttgtcggcactgagcgcattggtctgttcataaagattgagggcgaggacgagcttttcatcgccagtgcagccgatatcgtgcgcggagagtatgtaccgataacgaaaggcattgctgggtatgtcgctcgcacaggcgagacggtgataacgaatgatgcgtactcgcatccgctgttcgacccgacgttggatcagaagacgggattcctgacgaagcgcatcttgtgtctgccagtcaagtctcccgagggcacgatcctggcagtgctctctgcagtcaacaaggtcgacggaatggactttaccagcgaagacgcagttttcctcaactatgccgctgaagcggtgggtacttcgctacacaaagcgagccttcatcgcgaggtcaagacgtcccaaaagctcatcgaagcgcggctgaagctcaccacgttcatatctgaaagtaccgatatcgccgagttcgtggacatggtcatggagttgggcaaagatatcatggagtgcgaccgctttggtctgctgcttatcgatcacttcaagcatgagctctggatcactccacgagtgggtggtgagagcatccgctctccgattaatcgtgggatttctggacttgtggcaaccacgggtcaaaccgtgtgcacgcgtgacgcctacaaacaccagctcttcgatccgagcgttgatatgaagacaggctaccgcactacgagcgttctttgcatgccggtgtttgaagaccactcgctcacggtacctccaaaggtggttgctgtcgctatgtgcatcaacaagaaggagggcacccacgtcgttgccttcactaagacggaccgtgaaatcatgagcaaatactgcgcggaggtgcaatttgcgcttgggcggttgtctttggacatctcgtactacaaagttgtgtcagattgcgtggctgtcgctcgaaccagcatcgagtcgagctcgagggctctgaagcgaatgtcaacgaccagccgcatcgataaatactccgagacggacatcatttcgtccatcgtacacaagtactgtcatgccggggatgacaccagtggcgtgacgaagaagagaggaatctcctccttcgcagcgctcctaccggccatcaagaagaaaagtcacgaggatgacgaggttccgtttccacgcgagatcatattcgctcatggacgagatgaaccgctggataaatgggacaccgagacggtatcgctttcgagcagcgaagtatcaatgagttgtggcattattttccgcgcgtacggcttcatggacgccttccgcatctccagtgagaagttttcggcctttacaaccaacgtggccaactactaccgcagcaacccgttccacaacttccaacatgcgttccaggttttggtggcgatgcacatcatgttacgcaccgagtgtcgtcggtactttagtggtctcgagatatttgccatgctcgttgcctcactctgccacgacatcgaccatccgggtaacaccaacgacttcgagctcaagatgctaagccctatggcgctcacgcacaatgatgacgccgtgctggagcgccaccactgtcgagtgaccttcatcatcctcaaccacaagtccgccaaaatcttgcaacaccttgaccgagagcgccacaaacgcgtgcgccagctcatcattgcgtgcatcctcgcaaccgacatgtccaagcatttcgagaagtgcaaggtcctcgagggccttacgcgtcgacaactcagcgacaaacgtcccgtcttgatgggcatcctcatgcatgccgccgacttgtcgcattacgcgctgccgtttgctcaggcacaggagtggggtgcccgcttgcttgatgaattccaaaaccaagccgcggctgaaacagagcacggcgtccccaccgacttctacatgagaaatttggacaacaagcgcgttcggatcacggtccagctaaacttcatcaactatgtggttcgcccaatttggctccccctgacttcgctctgccatcacctacgggtaagctttgtatgtttctttgtcgtctgccacccttggtcatttactgctacttttttgcagttctacacagactcgttggagcggaactacgaaatgtacaggctgcaactcgacaaggacaaggacaaggacaaggacaaggacaaggacaaggacaaggacaagagcgttggggtcgtgtcagcaagtccttcgacagctacgctcccaggtgcaccgactagaagcgttttgtcctctccacgcaacgtccacagctccacttagtcaacaccgtcagtgaatctgtaaatgggactattgacccgaccccttcaccttgattaccgtgctgttagtttgtttgcctattgtgctttccttcttgtacacaaggctgtatcgtagcctcaactctagtcgaagaagagaacaaccaccgtggtgtcatcgtgacggcggcggcggtggcttccaggcggcaggctcagcagctcctggtacgtcatgccgtagcgcttcgccgccttctgaagcacccgttcaaccagcgcgcggccggcaaggtcgtggtttccgcacgaggcttggccgttgaccacctccacagcctcttcgttgctcaggtagtcccacaagccatcagaaccaataatgaggaacttgtccccctcctgcagcttgtgcgacttgacctcggggatagccgtgatgtagggcggcgtgtaaggtgccgaaaagtggcggccagcagagcgatcaccgttcacgtacggcggcccattaaactccgggtgcttgagggaaaagtcgccgaaagcgcgcgtcggctgcagcgcacccttcacgtagcacgagtccgggtgacggcaagtgaacacgttggcctctccggggtgttctttgatcagcttatcctgctcgaacttcaccatagcattctggtcgttgctgagcggctccgccacgatcgagtccgagtccttgccagcctttcccagcactgcacggatgtcgcccgcgttagcaacgtgaacagtgccttcgtgcacgtacgccaagcacgcgcaggagccgcaccgcgccacagctccgaaccccagcttgaacgccgacgccacctccgccatcaggtcgcggtccgtgcggccaaacgcacgctggatggcagcagccacgcgttcgtccgagaccgtcttggcgtccccatgagcgggctccttcgtgcccggcttgtagaggtacgacagctccttctgcacgttgccgatcagcgtcttgcgggcgtactcagacacctgccatccacctgcaagttgcaacacacaatgcagtcagaattcaagcagcagcaatgctacgtatccgagggcagcgcagagcgtaccgtggccgtccagcacggtcgcgaacacgtcgcccgagctcgtcgtctccaccgcgtacttgtcctcaatggggaagttggccttgtatgaggcgctgctgaggcgcgtcgcgcgcgacttcgagatgggcgcgaactcctcgcgctcgagcggcacggagaaggcgccgtccacctcgggcggggcgtaccgggcgtcgcattgcgcctccatgtgcgtgacgcccacgtccgtgagctccgcatgagcgagggcgagcaccgacagccccaggccactcaggaacagagcttgtcgcagcgccgagccatggaactaaaaagcacacaatgcaagtggagaagtgagttcggattaagattaagaggcttgcagcgactttaaatcggtcgggggagctggaatttgaagcgatagagtaggggtagttatcaaggaggtgggaggggtgcgtgctcaccttggggctctgtcccggcgccaagcgcgccaggtttcgtgcagcaaacagtcgcatgctcgacgtcgtccaagctggattagctcaaggggagctagaggcgtaacgatctgtcgggaggcgtaatgatatgtcgtctcgctcgattgtgaagttgaagtggttgaagtgatgactttgggatcgtgaagttggctcaggccgttggcgagattgcctgagcgtactattgtacactccccggcggtggtcccgtcagattggcgagataattttacgccaactaaggcaccacctgccgaggacaggtattggcgagtcccttgcagtttgttgcagtgcctgcaacgcagccccagaggtatgatacattgtcaacttgacacttggcaatgttaagccgtccaagtcggcacagattcactactccagtctcgtgctggcctctgtactccctcctcttctactatcgcaactttgaatttgtttgcatctgctcgccacaacgttctcggttgccacgttagcgagcctgagtgctcactcgccacggatgagtaagcgctgagggttgttacactgactgttcgatcaggcagctccgtgctaagctgcctgcctgaccacgcgacattgtgcgcgaaaatccgatgcagcaaagttctggacggagctcgcagcttcaccttggtgtgcgtccgtaggtcatcctcgctgcgtgagcagttggccacgttgtacgtcagtccaccgacgacagtctcagtgtgccgctcgtccacagcagttttgacgctggtggtgctgcgttgtcggccacgaagtcgtttctcgcggcatgggctcttcatgagtggacataatatcagcaggagcttgtccactcatcgcggagctcagcggtgcagctcgccgcaaatgacggtgcgtggacggcgagtggggcggcgcttttttcctgactcaagtacagatatcgcgtcaactcaacctcgacctcgacctcgagcggcaagagcgctttaggggtcgtcattcccggtgtgcgtttcgtcgggcaaggcgcttcctcttactcgcaggatcgaggatcgtcatggagttgtcacgaaatggtcaagcagatgcaagcggagccccaaaatgagcagaggcgaccgagcattcacccacccgagtgggtgaatgctcggtcgtactatttgccaccgggaatgccccacctttgggttcaacagcgcggatcgtgcgacgcggatagactcgcacgcctcccgcctccggctccagagattttcgcacgcggggcctggccagctcgaactccgccgcgttccgctgagagcgttgccatgcaaaaatgacaagtgcgagcgttgggatcgaaaattagctaaagcgctaactgcttcacgccagaaaaatcgcgctgcggcacccgtcgccacaccagccccaccagccccatcgacgctctcttggtgcctccgagttcactccgagtttctacccctgctttcttgcgattgcggccccaccgactccttctgggccgcaccgaccaagtagacgcggcgggcgagttggaggcgtttctttccattgcgtcgccgatttgcccgggcaccggcgggcccattagtcattttgctcgaaaagcagagaagtgcacgacaccccggcgctctcgatacacaccaaccatccccccagctcacggcagcgcgtgctcttgcagcagcatcgactaacgaaagcgacctctaacaccgaacaagcttcgagttcctggtggcaatggcggccgacgacttcttcgtgctgcacctcgtggactcggccgactgggtcgccgaccatgaacgcacgctgtgctacgtctgcacccggccctttggcactttccgtcgcaaacaccactgccgaatggtacgcaaaccgtcttggcaatgcgctggcataggattccaggttcctaacttttctggttcatttgactgcagtgcggagaggtggtttgcaagaactgcacgctctacaaggacgcccacgtcgatccagcgatcggccccacgcgggttcgcgtttgcatgtcctgtgtcatcaacaactcgaaccagcgctcgggtcggtccatgggtgcaccatcgccccaccttagcgcgacttcggaggcgtcacgcatgtggatccagagccacttgcactcgccgtcgtccggcccaccgtcggaaccggacagcgaggagctgcagcttcttcgctcgctcacgccgaagcccagacagccctttgagctcagggacgggcacttcaacgcggaaggcgagtcgaggaagagccgcaagaggaatctgcacaccaacgagcacaacagcgagccttcgtccgactgggcccacccgtggcctcgaccgcctgtgagcaccgacgaaggagaccgactccgagccttgtacgcgttgcgtgtgctggactcggaagcggagaaccccttcgacatgatctgcgatctggccaaggcgcgtttgtcctgccccatggctgcggtgagcttcttggacgagcaccgccaatggttcaaggctagcgcgggtctcgcccacaagatgatcccgcgcaagatcgcgttctgcgcctacaccgttttcatgcgcgagccgatggtcgtgctcgacacgctccaggaccctcggttccgaagaaacccgctggtctcgggtgctgccggtgttcgcttctacgcggctgcaccgatcctagaccccaacaccggccacgcagtcggaagcgtcttcgtcctcgacactcgcccccgagaggcgtgcgatatctccattcttgagcggctggccctcgcggcaggtgaaaaccttcctacggtgcccaacaacgacgagcagaaggctgtgccggataacaacgctgctgagaggcaagaagacagtgccagtgccaaccctgcctacattgcggctcaaaacgagctccaaagctttggcaggaagaagatcggggtgccgatgtccccagcgacgtccacttcgacgtcgtccacgtcgtcggtagtgtccgggtcgtcgaaccaagcgatcgagatgccgcctaaagcggaggacaacaacgacagcgaggatataccagaaggcgaaagatcgttggcaatgacgcaactttccatggggacgacctcggcgggcgagcagatggaggtgctgctcatgcgcttactgacgcaaaacaccgagacgcagcagcagctagctgtgcaacagatttcgctgtccgcgaagctgggagagcacacccaccagatcaacaagctcatgtcagacttcgctcgcatggaagccaaggtggaggccaaggtggacagcagggccaactgagcagtgagcaggaacctctgcatccttcgtcggaagagggtgcagaaggaagcaccgagcgggtcggtcacacgttgcgagcgggtctctcattatttacaaccggtgccggcgagctcgagagaagtcccattgttgtcagtgtcgtagccggcggtatctattcacgaacccccaccggattcgcttttccacgtcccacgagctcgtcttgccacgaggcaacgaagctcggctcagtaccttcggccttgccgcacaaacattcaagcactatttcatgttgcgatcgtgtgcgcagcactcttccgacgagtgacagtcagctcgtccacctagtcatgcatgtgagattacaaaactcgtcttccattacatttttatggacttttgcgaagacgtcaacaactcacacgttggctgaaccgaagcaggtgctgggtcgatcgtcgccatttccccccccccgtagtctgtacagctcacacggcattaaggttggcactacagcgactccagcgcgcttggaggaggaggagagaactacagacgcgacctagcggccgcgcttcaggcgtagacggccttctgcttctccacctcggcgatgtaggcggtcatggcgtcctccttggacagacccttcttggcgttccaggcgttccacttggccttgcccgtcaggtcgaacatgccgggggcggacgtcgtgttgtcgcccacggtggcctgcttgtagaaggcgtacagagcgagcttctcgtcgttggtctgagatatagggcaatgacacaggcagggttagtcgcgtctacagcttcgtgtcgagaggcagacacgcgccaattcacgtacggggctcttggtgaaggtcttcacgagcgcggcggcggcttcgaactgggcctggaggtcagacattgtggagagagatcgggggcggctgcggactcgtgaagaaaatggcgaatgaccagtggcaagtcaagctcccatcggtatagacgggtgggctcgcgtctaagtgcgagtgtgacgcgcgagtgtgacgcgcccgggcaatgagtgacgtggccgagcagcaatctctgccgtcacctccgtgccgcaagttgggcgacgtcttatgggcggcaacagcggcaaagcggcatgctgtggccagcatcacacgagtgatctccgtgaagcacgccgccaatgctgccttggcggccaagttggccacgcgaaccgggtttccggtgctgcgacatggtaccttgtggaacatcggcaacggcgacatcgggcgggactgtattcgcgtgcaatgctgggactccgaagacggaatctcctttgcagacaggatggtgtcgatctctctttgccttaacagctcgtggagtactgctgcgcgtcgtcgggcgtgcgatggcctcgatgtccaccaagttgaacgtgttgctcttttgtgtactctacttaacggagtggtccactgtacggccattattccgtcccacacggtacacggatctctgttcctcactgtaccctatgttatactttatccaagtgagtgcggcccagcagtcgctgtccagtcaagtcccaagtggcaacacaaaaatgccacacatgcgtagtcgccgtactcttcgattggtggtctccggttcagtcttgcccaacatggcctcaataagccgcggagaccccgcttatctctcctgagccatttcagattcgagccaggacgcacagcatggcggacgagcagcccgagttccacgacgtggtcgtcatcggcgccggcgtcgccggtctgcgctgcgccagccagctggccaagaccgagggcgtgttggacgtgctggtcgtggaggcctccggccgcgtgggcggccgcgtgatgaacgacacgagcttcatcccgggcatgagcatcgaggtcggagccgagttcatgcacggcgccaacacgacgctcacgcggctcgccgaggagcacagcatcggcatgcgcgagatcttcacttgggctcaggtgaggacacggggccaaaagcagaacatgtgtgtgtgtgtgtacttgtagtagccgcatcgattaatcagccactgattccgctcgcacgagcaatgagataatcttctggccttcatacgaatgcaagagcgaacgtcagatcatgcttccttaattagcatctccagggcgagcggcgcggtctccctcgggaggcccgttgctcttctgcgtgcattcggcggcacagttcttgtgtcgctgagtcttgcacgtgtccacccgggagaagtcagtctggattcatacatttccccaaaaaccaactatcgatatgtgcatattgcagtagaaaccaaagagaagtgtagagccatactcacggttccgtgtcgctttattgcttgttcagggcgatggtggtccgaccgagcccgctccggatggaggcatcggctactactacatcggcgaccagaagcgtatgctgaagtacgacgatgacgacgaggagttcctcaagtttaacttgtcggtggccgacttgagcgacctcgaaaacattgaccagatccctcccgagaagtcgatgagggactacttcgacgaggttggtctgtctccgtccatgatgaagctgtgcgagtctggatacgccaacactgccggcggaccgctggaagacatctccatgcgcactacgtgccgctatgagaagcagtggatcgagctggaggacgagggagacttccgcgtcgtgccaagcttcatgcgcttcgtcaacctcttcgctgaaggtgtgacgacccgcctcaactggcctgtggctagcgtggactactcgcagagctaccgtatcctggttactagcacgtcgggcaagcagctctcgtgccgcgcgctggtggtgactatgtccaccgcggtcttctcgaagatcgcgtacaccccggacctcccgcaggagaagatcgaggccgtgaattcgttctccatgcgccgcgcgggcaaggtgctcctgcacatgtcgggtcgcttctggcccgaggacgcccacggtgtcatttgctccgagtgcttcctgcccgagttctggttcaacagctccaagggcatcggccacctgcagcctaacggcgacaacactctgattgcggagcccgagacggaggacgcggtggaagaggacaaggctcagtacttgatcacgggctttgcaggcgcgctgtacgccgagagcttcgtgggcgtggaccatgacaagatcattgagaacttcctcgaccagctcgacatgatctacggcacggtggacgagcccaagccggcacacaagcacttcgtccgcggcatgtacaaggactggggtgacgagccgtggatcggcggcggctacgctttcccgcgtgtcggccagtcggacacggcttcgcaggatctcgctgccccagtggacaaccgcattttcttcgctggcgaggccactgccttcgagcagccgggcatgtcggtgcatgctgctatcgacaccggcagtcgcgcgtccgtgcaggcggcacgtgcgctgcaggagcagtagggagatcgctcgagagtgaagcagtgtgaataaaccttgtattgcattatgctttgacttcaacatgcaccgatgatcgttgtctgttatagcgccaggaagcgcgctcgcaaatgccacagctacgaacatgtgcatcggtttgccagtgaaagcggaccttatcgatcgaacctatttattagtttcggtgtggtggcccatgtatcgtacgctcaaatcttggtctcggtcagtgttgctgtcattgcagcgtgtcttgaactcatcggcgcgtgaagaattgatcagctgatcctgatcaagtgcgccgcaaaatatttatataagtagtgtaggcgggggcaggaagcgcaggagcatgtcgagggctgctgtgtcggtaccctgcctgcttcatagccgctgtggtgctgcagtcgagggcctccagctcaaaagtagttgctcgcctgctcctcgcgctccagccggctcaaaacgtgcttcccgaacgtgaagcgcttgaggtagtcctcgttgtgtcgaattatacatacaatgcggtggcggtcgtggtcatccgcgcgttccagcaatttctgcaccacgtagttgccgtacatgtgcttcatcatggggagcagtgggcaggatgctccgctctcgtcacactgaagaatgaagtcgacgatctggctgatctcaccctttgttgcgtgctccaggcaggactccaccacgttgctcgcgtacttgtgctgactccagcgcgcgatctcaggaagcaccgcctgcataacgatgtcccgctgatccggctcgccgtggctgatgacgtgctgcacaacgtagttgccaaactggtccttgacaagatcccggcacttgtagatgatttcattcagcagcgggcggatctgggcaggcgcgcagtgctccagcacgcgctggatcacacggcagccgtacgagtgcgtggagagcgctgcagcatggccgatgaagctgtcgatgatgaactggatgtcctcccccgtcacgaaacgctgaggacccagtccgttgtactcggcagctctcttccaagatgccgcctcgatgcatttctgcagaacatggttgccgttctggtccacgacgcacttcatcacgtggcccttcagctgccggatcagcgcgagctgctcttcaactcgtgtgacttccagggcacgctggatcactcggcacccgtacacttgcagcgccaggctgatcatgttgcttgtcatcaactccaccagtgcgtgctgctgatccgcagagccgtactcgaggaacttctggatcacgtagttgccaaacacgtccgtcatcagcaaaagcgagttggggtagatctcgctgaatgcttcggctttcacgtgctcgtcggccttctccagcttctgctgaatgaagcgcgagcccgtctggtccttggcgaagatgaagaggtgccccttgatggaagacagcccccatttctccgacttcggcgccgagttgaactcctccagcagactgttggacgagtatgagtgcgcgaccgggtggaagtactcgaactcacctcgacgagggcctccgaccttgggtctgtgcatcatctgcggacgtggcatgtagttttggaagtcttggcgttcgtacagggggtggtcgaccagagggtatgacggacggggcttgaacattttgtcggagggtttcatgccgcggtactctgcagcgtagccatccccatagttcggcacggtcgagttgtggccagcgtgcgggctcgcaaaatcggacggagcgaagccgaaaggtgacgatgggaacgagtagccgtcgtcgtcggcggcccatcgcgacttcgcagcacccatcatgactgggtagccttgagcgcccatcatgtaggacgacgggtagccttgtgccatcgctccatgatatgagccgccgaaaggaggctcgctggtgctccggccgaacacttggcggtggccattcacgccaacaagtctggggcccgtggcgtgctggggcatccgaggcaggtcatcaaagtcgtggccggaacggcggctggaatcgtagagcggcgcggcgcggtagtcgccaagccttagctgccccatgccttcactgatgccgaagaccgactgcgtttgctggtcccttccaccaaacgagggtctgcgaccagtcgagccttcatcgtcgaactgcccgtactcgggcgacggcgtgcgcgggaagtcctcttggatccggtcgatcaaagacatgcccgggggcacacggcaacctccactttgagtttggctgccaccacgagacgatccgctcctcgaagcactggcgctagggcggggaaagcttgggaccgcgcgcgggttgagcttgtcgggcgaagtggtcggggtgactgtggagtcaaactcgccgtcttcgaagtcgttgtgagggttcgtccagatgtccgccgagcggggctcagagcctcgtcgaggccgagcagtctcgcgctcccggagttgctgtaagcacaagcagcgaagacgatacagttagaccatgctgcagcggcgttgtcgaacgagttgaaccaagatagaacgcaccaggctcaacgacagcccattcgcctctggctcctggttgtccgttggttgctcgtcctgctacggaaacgaacgacgtcactgaacgttagatgcgaagatcgcgccagcaaccaaaagagaaagaggggcaagtaagtaccttgctcggcagtttctgcgccgttccccacgatgaccgcagctcgcccccgttctcagatggggcgtcgccgccgctctcgtgctggtcttggtcttccttctggttgtccaccgccgccgagtcgccctcctccgactcgctcgggggcgtcgtctgggcgctgtgcacggagcgcgagtcggccttggactgcagccgcggggctcgcagcgcgaagctggccggccgctcggccagcgcctgcgaggaggagaagagcagtgaggagcgggccttgaggccctccgaggaccagagcgagtccgacgggtacccgacggggtcctgcagcttgacgcgcaccggttccacggggttgtcgtgatggacgggcttctcgagcgccgcgatcctcgaccctgcagcaacaacgcgctgctgctgcagcggggccgaagaggaggaggaggaggaagaagatgtggagggggcgccgccgctgctcttggcggggctcatcgagtcgctgtggcccatggcggggcggggcaagtgagcgagcgagctgtgggcggttgctgctggcaaggcgccgcgggggcggcggtcgtccacttgcgcggcggccggcaaattggagaatgaaagctgctgcggatgcgggcggctcgcgggggttatttttacgcccgacgtcactgtcctctcgctttaagtgaaggcaacctgtcacagaagggcccgtttcgcgcaaaaagacggaaaccccggagggtgggggttaacgagtgtctatccttttgcaacgagcgcaagcaagcagcaaccaacccacccgcccccgctgaagaccatctcttccaacggccgcgcgagctcgcgctcgcgcttcgcgttcgcggagctcgtctgagatggcgggtgtgtaacaagcctgcgcgaaaccgcgctcgagcggctccggaagcagtagatggcccacccgacggccgccgaagggtgggtgggtggtccgctcgcatcggaaatttcaggtcacgcatcggcgccgcccgtgcatgcacatgcggttcgaaccgaggccgttagaggaggttgcctttcacggaaaaatcccaggcacgcatgcccggcggcgtgacgcgacttgactgggcccgttggttactattgctgttgctggctggctgcgctcggcaacagcagcagcagcagctcgctggggtttccgcggttgtcgtcgacagcaagggcggaatgtggagcgttatgctaacggcaaagttgaagcggcgcgggacagcctgggatcgtcgacacgcggccctagaaggggcagcgaccatcactccgacaagggcaaattgccccagctgccggcaccgcattcggcaacgacacatcttggtggcagcggcctcacgatgcggcgccatgactgctcgagcgcgcgccgggcgcgaacgcgcgacggctgccaggctcgccggcaaaggaaggcgccgtcgaagcactggcttcgggctccgcggaaaagcgctcgatcgaagggtgcagctcggcgactggcgtcaggggcaacctgacagggggaccccctttcgctttaacaccatgttaccgccgccgcgtcgctttaaagactctgcgaaggaaatatcatcagagcccgtgcggcaactacagtacaatggactaaagcatctgctgtatttgcctcggtggtggtgctaaagcgagtgggcgcgagagtatacggcgcgtcggagcgtcaagcaaggtcctcggcgcgctcgcgtccacacgttgctgcgcgtcctgtcccagccgcagctgccgcggggactgtggttgctttccctcggtgccagccagcctcgctagtgcagacggtggcagcgcggtcagtcagtcgctcgacaccaggcatgatggcccaagagagccagcaccatgcaagttgaagcagttgaagcggcagggggcaactcgctggttacgagctcttgggcttcaaggccagcagcgccacggccgccacgcccgccgtcaccaccgacgcggtggccagcgccctcgtggtcaggtaccacggctccgctgcgtccttggcagccgcagccgctgcctggcgctgcgccttggtcttccgcgtgaagatggacttgtcctcgccggtctgggtcttggtggtcgtcgtcttggtcgtcgttgccgttttgatggtcgaggccgacgcgtcgaggttctcgaagatgccgccccaggccttcttctcgtcgcgcttctgcttgtccacaagcttgctcaccttgtccagcaacgtgcggcacgacttgtcgcgagggttcagcttgaccgcgagcagcagatcctgcttggcgtccgcgtacttctcgagcttcacgcacgcctgcgcgcggcggaagcgcgccttggacggccagtcctcgaacatgagctgctcggacaggccgagtcgacccatccacgtgacgacgttgccctcgcggttctcggccagcaccgagaggatgctcagcgcgttcgtgcacgcgatctcggcgtccgtgtacatgttgagcttgagcttgcacgcgccgatgttgaggtggcagcggatcatggtctgaatgatcgtcgccttctccttgtgcgtggcgttgtcctggtccacgcgctggaggaagcccagcgaccgcaggtagctgtacacggcgtcctgcagtttgccgtcgcggaactcctcgttgccagtgtccgcgagcttgatggcctcgcccaccagatccttcgtcgacatctccgagatgtccttcaccggcagcttgacgtccttgcgctgcatgaacatgcgcgcgtagtttgtcttcacgatcagcacgtcgtcgtgcgggcggatctcctccagcacgcccagaccgtacggggtcgacacgttcatgtgcatgcggaggtgcggctcatcgggctcctccttcacgacgttctggcgcaagtacgcaatggtgtggttcttcgacgcggcgtcggtgtccatctgcaccacgtacatcttggtctctggccggaaggacaccacgacaccccgtccgaacggagtcacaatacgcgtcttgtccgccagaggggctacgctgactgcagcggggtggtgcgcgtcgacgcggaacttgttgccaggaacgtaaagcgcagccttggccgtggccttgccgaatgcagcagggtgtctcaccggcgcgttcacctgccgcgcggtggtcttgtaccgttcaatatcgtcgtcgttctcgcgcttcttctgtcggagcagcgccacctcacgctcgtgacgctcgcgcaccgagtactcgaacgtgatgcgcagcagcagcttgccagagacgccagtcgtgcccgccgacgccggcgccttcaggtcgaaccacttctcgtgcggcagctggtcctcgaagtcggcgctgcgcagctcaagctctccgagcaccacatcggcaatcacctcggcgctgctgctgagcgagaccttgatgccgaacttcttggtcttggcgccttcgtacaccagcgactccttccagctagcgctcgcgttgtccaccgcctgcacgccgcttgtgcgcaggtgcttcttcgtggacttctcgaacgccgacagcggcgtcacctgcgtggacacgtacagctccggctgggcgctgccgctggccgccagcaccgcggcgttcttgtgcagcgccaggtccttggccgccagcacctccaccgtcacacgtccggccgccttgcccgtcttggcgtccacgtccacgccgttcttgttctgcttgccagctgcagcagcggacgccacctcctcggcatgctgcagctcgtgctccagctgcaccgacagcagctccaggggcgacagcgccaccttctcccacatgagcgagttgtcgagccccacggacgacgctggcgagtcgctcagcgattgtacgtcactcatgcttgtcttttggtcgagtgaatcgtgtgatggatatgaagggctgggcgatgggagctggaaagtgtcactaacgcgaggtagaatatcccgttctttgcacaaaatacctgatcctgcaagaatgtgtgtacaaaacttgaagtatcagctacatgcacagtactggaatcggcaaacctgcacgagcttcctgcatcgtgcatgtcgtccaagactctttctgtaccatgcatcgtccaggacccttgctcaagagcctacgcctcagtgcgtcaacttgactagatcctcccaccaggcctacctgtataatgcgttgaaatggagtcgccgtctcgataagagcgacaagccagcttggtctagtattccaagccttggaatacttgtataaggcgtcaaagcacttgcgtgacgcagctgcagcaggcctggcaagtgctgcaggcttgtcaggtctgcccggggggctccttttagtatagtggcgtcccgcgtgcacccagccacgccacaccataatgatacaatgccggacattcctattcaaaatcgggtagttaggtttctatcgtggttatgcattgacagcaccagcaaacaaccacgccaccacgtgttatagcatcgccatcgcttgccatcagagcggcagcaaacaggctcagcagtcctcacaagctgctcacgtagcagatgtctatctcctaactccaaaattgccaacctattcgtggtttttgattccagtcaacggcccgcttaacaccactgcttcactggcaaccacagggtgttctaagccaccaccactccatcaacccccccaccacctctccttgcttctccctcgtgcaaagaggtttctgcggtcatttctgcgaactgcatacttccctggtcattcgcgtccgtaatcaactctcagaacgcaattcgctggcaagatgccgatccaggccgaggctgcggcggggcctcgcgccggccccgcgggcccggatgacccggcgcagcgtctccgcgtgatccgcgtggaccgcaagtcgctgctgacgcgggccaacgcggcgcagcaccgccgccgacgcgaagagcgggaggcacgtcgactgggcaatcgtacctcgtcgtggctgttcgcgggagccaagaggccgcacgaagacacggtggagccgccgtcgcccttcgcgagcaacgtggtggtgagcgccaagtacagcgcgtggaacttcgcgccgcgcgttctcctggcgcagctgcagcggccctcgaatgtctacttcctgttcatcgcggtgctccaaaccatccgagaagtgagcaacacgagcggcatcccgaccatcctgctgcctcttgcagtggtgttcgtgtgcagtgcgatcaaagaggcgctggaggaccgagagcgacatcgagccgaccgcgtggcgaacagtcgacccgtgctgacgcttacgccgctgggccactgggagcagcggcaatggggggacttgcgcgtgggagacatcgtcaaggtgatgaacgaccagaccgttccggcggacctgttcctgctctcgacggaggcggtggagcacgaggatgatacgagacggacacaggtgcaggtggtgactgcgaacccgagagaactgcagggcccagacgatgtggaggaggggaagagagacgaatcggaccttcttgttgacatggaagacagccagggaacgcaagattcggcggcgtcagagcagcagacgacggagtccaatttggcgtacattgagacgaagtcgctcgacggcgaaacgaacctgaagatccgcacggccatcccgttggtggcttcgctttgtcgtggctttggtggcaccaatcggagcattgatggtggaggccacaacgagttgcgcgggatgatggtgtgtgaacagccgaacaaccgtatcacgagttttgaaggcaccttttcggcggtgctcagtcctgctcaagcacagtcgttgggtgtggctaccagcgatccgaacgcttctccagtctctgtgcaacctgctgcgagcctcttgcagactgaggtgggtggggatgggcttgtgcgtgtgcgcatgccagtgacggcgaagcaaatgatgctgcggagttgtgttcttcgcaacacgcgctccgttacaggcatggtggtgttcacaggtcacgagaccaaggtgttttgcagcaacactgagcctgttgtcaagacttcgtctgtcgagcgacgacttaaccgactcattatcggcattgtgtttatccagcagcttgtgtgcttcctgggcgcgctgcttggagcacattggatgcacacggaaggcgactccttctggtatcttctcagcgctagtgagcggcggcaccacattttgactggagctccgacctcacacccgctagccgaagtcgccaagctccacttgcgctacttcatcatcatgcaaaactttgttcctatctcgctgaacgtgtcgttggagttcgtcaagtattggcaagcgtattttatcgagcaagatctggaaatgtacgacaagccgtcggatactccagccatggtgcgatcgtcggcgctgaacgaagacctcggtcgcgtacatcatgtcttcaccgacaagaccgggacactcacgatgaacctcatgcttttccgttactgtatggtcgggggaaagcattacggtgggatcatgcaagacaaagacatggaggcggaggtccccagcgttgcttcgtctccctcatcgataacttcgaaggatggtccaaggtttgtggattttgatccatccgagctttttgctgatcttcaaaccggaggtgagcaggcggaaactctgcgccgcttcttacgacacttggcgctgtgccatacgctgatccccaccaaatctcttgcagaaatgtgtagtacgtcgttcccagagtactctgcctcgtcgcctgacgagcaagcactggtgtcagcagcagcgttttgcaatgtccggtttgtacacaggacacccgccactatgatgctcatggaaccggggtgggcggcacctagcacatacaaactgctgaatgtgctagagttcgacagcgaccgaaagcgaatgacggtgattattgaaactcccgatggtacactcgagcttctttgcaagggggcggacaatgtgatctttgaacgactggcggccgatcaagctacgattcctggcggcatgtcctacgatgaagctgcagaccagctcacggtgtatgcgaaagctggtatgcgcacactctgtctcgcgtataaaacgattagcaggtcggagtatgaggactggaatgcccgttattcccaggcccatgcttccatggaggaactggttaaacgacgccaaggccgtgaaaatgcaattgacccactgatgaacgagattgagcgcgaccttatcctgcttggtgtcactgcggttcaagacaagttgcaagctggagtgcctgcgacgctacgtttgctgcaggagacaaaaattaaagtttggacgctcacgggcgacaaaatggagactgctgtgaacattggatacgctagtgcgttgctctcgcacgatatggacgtccagcaaattggcggtgatgactacagctcgacagctgcggcactaaaggagttgtcccagcgaagtgaggcttccctcacttcttcttcctcgaggtccaaaggaggtagaggggtgcgccgtcgctctcatgatgctagacgcagaccacggtcccggacaaacagtttcctgggtagtgcgaaagcggcgatcagcgagtttttcttcggttccacggcaaagcacaagcggaaacaaaaacgaaaacgccaccgaagtcgtcgtacgtccaggacttcgacgttcagccaaacaccgatgtattcgtccgttgcgactgacgctgagtgtgccgacaagttcacgtccgatgaagaatcactgtatgatatcgggattgacgctgacgacgaggcaatccacaccgctgagtatgggtctctcactggaagtttgtacggtggcgaaaagcgtcaccagaatggcccatcatcgcagcagttagcactcgtgatcgatggacaagccctcgaattcgctcttcgccctcaactgcgcaaattgttctaccaagtcactcggcagtgcgcttcagcggtaatttgctgccgcgtgtcccccaaacagaaggctgagattgttgagtttgtgcgtgaatttgaaccggacagcgtgacgcttgcgatcggagatggagcgaatgatgtagcgatgatccagtctgcgcatatcggtgtgggtatttccggtcaggaaggagcgcaggctgtgaacgcttcagactacgccttggctcaattccgcttcctgcagcgactattgtttgtgcacggtcgctgggcctaccgtcgagtggcgaagctcatgagctacatgctctacaagaacgtgacgtatgtgctcacaacgttttggttcggctgcttctgcgggttttccggtcagccccttatcctggatgtggccgcacagagtttcaacgttctctacacgagcgtaccgttggttctctttgccgtgttcgaccaagacgtctcatctacgagtgctgccaagtttccgtacctatacgcgctcggtcaaaagaacgttctcctgcgtcgtcgtgtattctggccgtggatcttgaatggcgtttggcactcgctcgtcatcttctttgtttctgcctgggcgttcgagggctttggcctaagcatccgcgacttcccggttatcgccaccgagacgggaaaaggtggtggtcttgtcactcttgggttcgtggtgttcacgaatctggtgattgtcgtgaacctgaagttgtgtctcgaaacgttcatgctcacgtggcagttcgtgctgacagtgaccgtgtctgtattgttgtggttcgccgtcggctctctcatttcgttgccgaacacgggttttccgcaagccactggcgagatggagtatcttcaagagctgccgaccttctggcttgtgtgtctcctggtgttgtcgttgagtctgctgcgcgacgctctttggaagatcgtgcgccggttctcgctgccctccatgtatcatattctccaggagcgcgagctcatgggcttgccgaactctccgcgtggtatgatgcgcgagcacaggagggctgtatcgaatacggcgtggtcggatgaaccagctacagttgtggactacgccaagctgttcagcaacaggccgcgacgggaaagcccagaggagacgctcatgcgctcttcaccactcggtgagaggctaatcgcgtcgccattttcgtcttcgtcgagcggtggggatacgatccatcctgatcatgcagcagggttcccgagtcgcgagaagaagcgtaacatccgcatacgcggctcatttcatgccattggaagcagcggcagcttcggcgcaggtgtggagccgtctttcctcgaagcgccggggtcggttgcagtgaacgccgcgactgtcggagttggagcgcgctcgtcatcgttcattggggtacctggggcccaataccacggctacgcgttttcggaggatgagaacgtggacagtgatgtcgaggcagcgtcctccagtgcatctcgaggcgacgctgaccaggctaggacgacggcattcgggcattcgtcaatcaagaaggtgctcaagtcggttcgtggtagaaagactgcatgagtgttgattttacatagattgtgattcagggcgcaatgaagacaaggtggtctgtacgatggtgtcgctttttccgggatgaggagctgttgtttgtaggccacatcgagagcattcgagagcctcgtgaacggcatggagatacctgcgctcactgtagggtcgacgcgcaatgatcaccgagtcgatgtgccgctcaacgacgcagcggtatggccttgcaattcgcacaggctggaaatgatcactgacagcttgtctataggtacgagcatacagcactcgctcgggaggagaccgcggagcagacacgacctcaggtatactcagttgggtcttcgctgtctccactgccggtcgctgcaagaggatgcaattgaacgtgtgttcctacgcgatggagcgccgagtaagtaagatatgacagatagagagcagagagctatcctatgagtatcattccttacctgctcccagcgactgtcaccgtcttcgtactcaatcttaagtgctgctggtgaggcctgcgcgctgctcacaacgccgtcgaaccagtcggcttcgtcgggccagtacacaatcgctttacgccccactatcgctcgagcgctgtgttcactcaacggcagtagacgctgtccttgatcgtactcatctgtagtcgtgaacgttgcggggagagggcggatcttagcaggaccctacaagcgaacgtgaacgataacgcaagacaacggcacatgcacactcaggccacggacttgcggcggacgaacttcgtcgttcgtcacgagcggatcaacaacaagctacactatcatacctcccacgcctcctctccgtcgtcgtactggacgaagtagcgcggctcgttgccttcttccacacgttggataagtccgtcgaaccactcgttctcctagatccagaagacctgcacgcgggtgccggcgctgagcagggcgatgttcgtctcgcttggctgtgggtttgccacttcaactgcagcagcggatgctgcatccgagcccgtagcatcgtcgtcggactcgaacgagtccgagtagtcgtcaaagtcgtcaaagtcgtattgctccgaagccgcggaagccgaagcaacggagacaaccgacgagccttcgaagagagtgctgcactcgctgctgctgctggccatcctagcaaaattcagcgtcttccctttgcagcctgccgcccgttacgaagccgagcataactaacatcccggcggtctggccgtggatacttgcaccggttgaagcgacctggtgtagccatctgctgctgttcgggccggcggccatgacgcgtcacacgcagcgctctccattgagcccgtgccacgtcctgcctgcggcttcaacgcgttgccccacgctcagcgtctcggcgctcgccgccggctggatcacaaactttggatgggcgcaccgggtgggaccggccaaggggatacagccagtgcgtcgtggccgccgcgaggaggggaggagtccgcggtgccgcgcagaggacatcacccccgcacacatttcgacagcggccagtggtgtcgctgctcggctcagcgtttctgaagcagcgcggacggggctgcaacgactgcaaaacgcccagcgacatcggccatcggccgagtgtcgccgtcgactctacgcaggtggggcggggtggacctggcggcggtcttatcctggcaaatggtaccgtgcgccaactgcaactacagacgcggacgccttcgggcggtcgaccagcgagcggccccaatgcactttgtgctcgacaagcagcgctgcactcccgctatgcggcgtttcgtccggttgcagtcgccgaatctctcggtccgataaacaatttttgagacgaatctcccgagactcgcgccgtttataccatcgctgccgagcgctttgccgctgcggctgtggctggctggcaacggaggcgagatgcattgggggcctcgccttgcagctcttggcagtgctcgccgccgccggcaagaggtcacttatgatgtgccctatgacgcccccgaacattctcggcgacgacggataatacggttagttaaccggttaggttagggtttctacagactccatcgctgataggccaaaaaggacgcgcgctacatcccttgtgattggcctaataacaatcaccgcacggcggttggttgaaaatcgaccagtgaggccagagagtgggctccctcccgcacacagccggggccgtgcggcaacccgaagggttaggtccacccacgcgccgacccatttttcagtcagtagagaatttgcgctgtagaaggcaggagaagacgtcgcgtcaaaccaggcagagaggtacggatcagaacactgcttgctgttgcggttgctgttgtagctagctgcctccgcgacgccgccgctgccgcgtcgcagctgggcgacagacgcctaaccactaacgtctgtgtgcttctgtatgcttgtgttcgtttgcctgcgcagtagtgcatttttgtcgctgtaagccgagagtgaactagttcttggccccccacacacctcaaaacaagttgccgagcgagcccgttgtttgtgcacgagctccttttgtgccgtttgtccactgccacctcaatccgcacagcgcagcagcgaaaaaaagcaccgcacggcggtctgtgcctgtctgtccctttgcgcttgcgctcttgcagttcgctggacagaggatccgacgcgtcgcttgtcagacgcatcgcttgtcttgactccgcgtctgttgccgcgcacacacttattgctcacacgcacacacgcacgcattgtttagtaggtagtttgcacccgaactactgaacgacggcaccgtggcggcgacaacagaggcccaggagagcgcgtcagagcaagttacgggagttggctaatagcagcgccagacaacgcgaaagaaactctttgtcagcacagtcgacaacggagaacgcgagtggaaacaaacaaatgacagcggagggcatgcgtgccaaacgacgaaccacataccaaaacatgcacgagatcgtcaagctggccaagaagtactcgcccaagctggtgaagggctacagcgcagggaacatctccgttgtggacaagaagagctggctcgaggtctgcgatcgaaagcaccggtacgtacagcttgcagcgttattggatcaatattgggactgtacactaatgctttttgttggcgcatgtgtctgatcagttacggagcaaacctgcgcgcgtattataaggagtggaagcgccagccaatggagccaacgaagccgagcttctgggagtggctggacgatgaatcgattgaagtcgctggtgtgccgagaacgaaactcgagcgcgagactgtgttgtactgcgatacggctgcggagcgccagaagtttgcgctctcggtgcagaacggcgtgattgtacatgacgcctcgcaagagatcgtggaaacgggcccggatggatggatttttgtgctgcgcgatggagtcctctacggttcgcagaaggagacgaagaagatcccgcggatccaccatacgagcttcgtaggcggcgagtgcgtgcagacggccggcatgatggtgatctcgaaaggggtcattaaaactatttatccccacagtggtcactaccgtccgtccgagtacgagttgctggttttgttgcgctttcttgtgaacaatggcgtggatctgagcgacgtagaggtcgacgtgcagcgaatccagaaagtgttccgcgactcagtaaacggcgcactggtaaagaagctggacaacgcgcatttttggaacgcgtaccgcgtgtggtacttcttggaggagaaacaccttgcgtggaagatcggtctgtttgacgaccttctagagacgatcggccagaagacggacatgcacgtgtcgcttgagcgctcggagatcctggaggacagcgtcatggaggagatcaacgacgagtcctctgagatctcgttcaaggacggcggctcgcgtgcgctttctctcttgcggccggcgtacgatgctccgacgtttgaagaagcggcgaagcagctggcgtcgtgcgagctgcagccgtgaatcgcttcggtcgtggctatccgagtagtccctacactttcgttttctcaagccaagacaccaccacctccgcacctgggtggcagcggatacgacacacaccacacctcaagcaaagttataatgtaatctagagcgaccagagacacggagggtttctctggtgtattggtagttagcatattggtagtagcaacagggaagacaaagtcgatggagaaggagaagtcattattggagcgcagcgcgcggcactcggcatccagcgcgactgtagcggtgcgttttattttttattttttatttgatgaatgcgtttcatggtttcgtttcgttgttgttgtcgttgcatttgcttgtgttggtgatctcgcagaagggctgaagaggcttgttcgctgcttcaagcggagatggcggaccgaggcagctctagcttcggggacgtccaaagcagtggagcttcttcagcacttcctgatgtgagtgtcccggtcctcagccagatccacgtttcctgctacgtcacagctgcaaatcgagcagcgccggtgttcgaggttctcccacagcacaactgcgtgcgagttgtgaataaagcctcgagtgatgcagcttccggtaacagcggaactgtggcgaccggaactactgacatcgtggcgcctgtggccgagtgggactttcattcggtcttttcgtcgacatcgccttcacacgccattgatttcttcactgagatcacattaccagctcttcgtacagcgcgagacggaatcaactccaacgttgtcgtgtggggtgtgcatcctacgcagaagtttagactgctgttcggtaaaagtgtgggtgggggcgggtttgctcctcgaccggaaatggctgtgaatgatgtcgtggagctctacggccagcttgtggggatgctacatgcattttactctcgattggatctgggatctcgaccgattcaggacgagccgtggcgactgggaattagcagttggattatcgtgaacaaccaagaaattgacctcttgaagagtccgataggaggggcgtcaactgaaggaagcagaatgccatcggagaaagctgaaccattgtcgtttgtctcgctagaggcgacatcactggctaccgcttttcgcattgttcaaactgcgaagaccaaccgcatcgtacgcaaacagaacgcagaaagtgtccactttttcgtacgtttggcgttatttcatggcggtcaggtcagcacggtgcaccttgttgaccttatcgaccagaaagaatcccaagaccccgtcttgaatcaagagaagtacgagttctacaacattttgcaggggctacgacagccctcattttctccgaggcgaactggagacggatgtggcggaggagctgcagtaatgagttctgctgggaagatggtcctgtctaacttcatgttgccgctcttgactgcgaacgccaagacctttctgtatgcaaatgtgattgactcgcgctcgagtttgcgggaaagcgtgcagatgctaaacgctgtggctaaccttcgaggattcgcatgtgtttgcaaaccactacgcggcgttacgtttgagcagctccgtttccaagctagcccagacgaagagcgacaagaaatcttcagtcaagcagaacagtttaacgcaccagacttgggcatagactcaaggcctaccctgaatcgcgcgtcgacttcaccacctatggcagcgtcttcagctcggtcatcttcgcccataatcgtacaaacactggagagtgagctgccaccccatcaactaccacaaacgaagttatccagctcgttttcagatggagcgtttgagtcggaagctatgagctggttgagtgagtttgctcaacggaaacgaaacattcttggaggatctattgacacgatcgacacggttgcctcaatagctcgagtccccgaaatccgtgcaagtctaccattatcttgtggagaatctgaaaatgagtttattgaccggagtgacgcaacgctagaagcacacgcgactatcacagatttatataagcagttgcgtgagtcgttggaagatgtccaggagatagagctggctggatcggagagtccacggggatcctactgctcacttcactcgttgcctcctggtcgctctacgcctgaatctcatccgccactaccgattgttgaccaagaggcagagcaagaggacctaccgcgggttggatacagcagaagtaccattggaggtatcgcgcggcaccaactacagcagtcacatgaaccaaatcaagaggagctactgccatggtctcagtttaatcgtacagctctagatcgtgatgcctcacaagcgaacatgttaaggcccgaagtggatgttggtgaatcagtggaagcggagccggtgttttcatcgctgtcagctattgattcatcccaacctaagccttcttcattatctgcgaagccggacaaattcacagcggaagcgttcaaaaaagctggcttacacccctgtatcttggagcctccgaatctcaacgggttagatgcaaagactgcggaaaaggttcaagcggcagatgcaactttacttcgcaagaactatgacgcactgctatcaatcgtccgtgaacaacagcaagcaaaggaggcagccgaggcgcgagcggccgaggctttgcaggatcaggaggagcaacgagcaatgttcgaagttcagattgaaaacatgaagctggcgaatgtcgggcttcgaagcaaagtacgcgcgctagggaatcgaacttcactgcctcaagtgtttgagcagtatgaacaggagctacgaacacttcacgcccaggtcgaggagctacaagcacgaaacgtggcgcttgagctccgggtaacaactgcgactgctgcctactactttgaagtatatggtcgaaatgatctgcctttactaattcatcgtgaactttgttttactgatgtgtaggttggtggcgatggaaatggaggaccaggcggatctgcttccgaaatcaagaagaagtatcaacaagtggtcgaagagaagttggcacttgagcgagaactcatggagcatcgaaggagagaaaggttagttttcttactaggtggtggcatcgtacttgcaaattcttctgctgacatgtaatttcgttgagaacaggcatcatcaagtccacagtcgccttgcgggtgaatccactcgtcgtgtagaccaactttcacggtgcgttgaagcaagcttatcttgatatgttcataagtatcgtattacaatagaagctgaccagtatgcgctcatcgcagcgacttgaacaacaaggaagaggatctagtggctacccggctgagcaagcagcggttgagcgctgaaatgaaccaggctcttgaaaaggccgatcaattgcatcatgagaacgaaaagctgctacaagagaaggcggctacggccgaggagctcctcgccactaggatgtatctggcctctcttgaaaacgtaagtgggcatggtaatcttccgtgtccagtggacttcagttgacattgatcatttgattgcaatctatgcaggagaagaagaaagcctcgatcctcgaccgcttcgttgaaaagcatggcaaccgcatgaacaagttgcgtcagcattgtcaaacgtcttctgggaattggagacgcgaccagtacgctcgtgaatgtgaagacaagcttctagcaacagtgaagcgctcgcttcctcaggcagtcccgctctgcaacaagctgctgcgacgcctagagatgcaggagctgtcgctacgtgagttctccgagcgggaagtggacttcatcaatctgctcgtggaacttgtgtcggaccaaccgacagtctcactcaagcagatgattgaacaggaaatgacgaagcttcaatcatgctaacgcaaaggacgcaataatacacgagttttgagttggcaaatgccaagaggagagagcgaccacctccccacgatccgcattatcagctttaagccgtcgcgcaggccgcgcggcacctgccatacttagtgtgtctttccttctctctacgataacaatgctcgagatggcagccgtcaatcgatcctcaagtggcaacaagtacgcacttagtcgacgttggccatggcgacgtcctgctccgtgaacttgcccttctcggtctcggacacggcgcggttcttgcgctccaggatcttcttgcggtccttgtcaagcttgagcttggtgatgaccaccttggaggcgtcaataccaatgggcaccgaggcgccgttggccttctcgcgcaccacacgctcgacgtggatgacgaacttcttgcggtacacggcggtcacgcggccctcacgggacttctgcgagccacgcacgatcatgacctcgtcctccttgcggataggcaggctgcgaacctataataatagcaaacaacatggcaatgagcacccatgatatctgtcgagcttgaagcctgagcaacgtcgatcctgtctgtggatgtcgagtggccgacacttacggttcccgcgatgccatgaagtgccagcctcccccctttgaaggagggggagggtctgacatggacttacagcgctgaaagtaccagtgtactaacttacattgtacttgttctgcagctccttggacaggggcgcgctcatgagcacacgacgctgggtcgagtgggcgccgaagtgggccttgcggcttttgcggcgcgacgaggacacggtcgagttgaacttcactgtaattcatcagtaggtagagcagccacatcgtgtgagtcacatgttcccctggctgtttctctgtgtatcatttgggatactgtaggtcattttcaagtagcagcagcgacgtactcttgttatcacgtaagaaaagagatactgtggcgctgtatgggctggcggcggcctggaggctttcgaggccaaccaaaatcgaggcggatgaggtggaattgggcggttcaggaaggacggttcgggggtagggtaagtggttggaccggttagggatgtggtacactgtaccatttcggatgttgaagaggacgaggacgctggtggacgcttctacctcacatttatactgggataggaagcgacgaagtgctgatagcccagcccaaacacgtccaatcgacaccggtgatgaaccggtaacgtctttaggtcaatttacagtaagtgatgtctattgaccgagtgttttagacttttcaagaatgatggaggctggtccagttcatttgcaaattcgtcgagttagattcgtcattgattttgctctgaaatcggttgtacgtcgtgaccatagtgacgatacattgtcgggcagattctgcggctgcgaagcaggcgcaggagatgccggattgagtttatcaatggcgatcaaaggtgagttaaccaatcctatcgcagccttcgcgaagccctagtttaattggtcgacggtacttggcttaaggagacttggaacgtgacggagttgaaggccggaccttgtggggcgtctgcagactgctccttgctgatcggttcgtgttgcgcgtcttggcgggcaccaccagcttttgcttcagagcgtgctgttcaacggaatgccagaaaagggttagaatgggcatgcgctgtgcaggaataaaaggagaaaaacacaaacctcgatgatgagagtagcgggctctgtagcggcgggcatacgggggttctttaggattgctgcagcgctgggtcgacgtgccggatccggatccatcatctatgcgtaaaacatcgtgagttagcacgagcatttggcgctagcaacgagggtgttggtttacctgtcgaatcaaagcactaaggtcctccgaatattcaggagagaaggacggcagtactccttctcggagttcatgccaatccttcccggcttctggcagcgtcattcccgtgacgatttccagcatcattatgcctacaccaacaataaggtgagtgctcgtcgttgcacaacatttgcggcattttatcttacctagacaaaagatatctgctgacggaagtcggtcagcactggacagcagctcctttgccatgtacttggcatcgccttcgaggtcgccaaattggctcgatggtttggaggaggttaccacttttccagccataccgaagtcaccgatctttaatcgaccgtcctcggtgataaatatgttgtcgggttttacgtccagatggacaatgtcgtggtcgtgaagtaccttcaacccacttgcgatgtccctcaaaatgttccacacgtaattttcggggaggttctcatctcgattccgcgttgccataaaatcctgcagcgtgccaccttcgcacaactccatttgcagaaagaaaaaccctgcaaccagtatcaattgatcagcacatggccagcgcagagccttcacgctcatcgcatccagatctagcttaccattttcttgccacgcctgatagtatcgcacaatattgtcaaagttgtgctgagatgcagccagcttttcaagaacaccgatctcttgggacatgagatctctgttacaaaggatttcaagtggcattagacgaccatcaacggaattgcaagaacaaattgcagcacagtaccgttctcgatcattgcgcagctcctgctgtgatttcttgatggcaaagagctctccactgtctgggtctcgaacctacacgttgcaacacaatcacaagtgcatcaataaacactgtgcatttgattccacacacacaaaatcccagtaccttgaacacttccgctgacacaccagctccgagccatcgaagagtctgcagactctcaaacgaactcacaaagtggttctgcaccatcccaccaataacaatcagcaccccccccaattccccaccacaccgccaaaatcaccaaaaactcaccgagcagccctcaacactaagttgcttgaccaccagtttcttcagccgaagcttcacggggctcatcatggacaacgtcgctccgagactgttgctcagcatcgtcgctggactcgcacacggcggcgacgccgaccgactgcatctgtacagtacccccacaaacagccatctcaatcagccaccccttcacttcaaccccttccagcactaactaactaccatacctcctgacgaggttgtgtctccggtgcgacgtgggcgtggtctgctccgccgagcaggacctccgctgcaacgtgttgctaggcgactgcggtgactgtcggcggtacggaggatcctgcctgacgtacacatccaggcgctccatgcgacgcgtgcggtggcggaaggtgccccctggacggtcaacaggtgcgtctgcagctgtctcgtagctgtcatcttcagcgtcttcgtcgtcgtcgtcgtcgctgatcatgaagctcaaggtcttgctcacgcgcggggatgaggccttggacgcctcctccagcgccgcgtgcagcgaccgcgcccgcatcggcgacggcgacgtcgacgtcgagttccgcgccatgccccctaattattgccaaatttgggtacatttgcctccgcttttggaccaatggccgtgtccggcggtatttatagaccccaaaactgaggcagggctaagctcctgggctctgcttgcacttcggttctgtagctgctcgtagctgctcagatgctgggcaagatctcgcactggctggccacgcgccacgaggacaggggcggcgccagcgacgccttcgtgcagcagcgctacgacgcgctggtacgtgtggggtggctgtgtactagcggtttgggtggaatatgggaaatctgagaataattttcttcttgtgtagacgcggctgaagaacgcgacgctggcggtgctgcgcaaggaaaatgcggcggagttgggcgatgcaggcggtcaacaggcagcggccagtcagcagccaggggccgagggcggcttggcggcggtgtcgctgcccagagagcagcgtcagcagctgaccgagcgcgacccttgtgtcggcgaactctgtacgtgcagcacaggtgtagtgggtttaagtatgaggtagtgctgatgctgtggggctgcaggtgtggcgttggaggagtgtttggtgctggggctcaagccgcggagcactgaggagcagccgtcctggtggcacgtgctgtatgccagcacgctcattgtggacgagccgacgttggtgcaaagcgtgctgtccgctgctttcctctcggaggttggtgtacggcgtgtgaatgggtggacggagcctttggtggtcttattaatggagaacactgtggatgcaggatgacgcagggaaggcgcgctgctggttgaagattgcactgaacaaccacactattgaatcgagtataatggtaagcgctgatatgttctggttgggttgggttgcgttgcagtctactcatggtttgctatcggtggcgtgctgtgtatggtcgttagatgatcttttccatggcgtgtgagcacttgattcgcaacaattacgaggagtggtcactggttcgctgttcggaaggactgggtttgtttctcgagctgattatcgctcttcgggatgtgcactttgctattgaagttagtggcgatccattttatttgccggaaccggcggaaacggtggaggtggagcctgttcctacagagagcagtagtggcgagatggttgccaccattacggatgctgatatcgccgcggcggtgggtgtgtcgccttccagggctggttcatttctaccgccgccggatgccgagcccgcactagtcgaacttgaaaatgttattgaagtaaaagatcaggagattcaaggggctgtcactactacggaggaagaagaggacgaggtcatccaactcccgtcggctctgtttccgcatcgccttcggggaatcaaaccgtggcagtacgttttcggcgttagcctagcctcgctctcgaagaacccgtaccacagccgctacgctttgattgacccattgctggcccttcctaatattgtggatgactgcgtggcgatactgagggagaacccggatacccctcgactatttcgtacgacagtgctgagcatccgcttaaaccagcttcgagaaatagtggagaccgatggatcagtaccgaaagatctggatccccaatgcgcaggagcgctgctgctagatttcctgaaaaacctgccagactcgctgctgacggatgataaatatgatgcgtttgtggcagccggacaactacgggatgaagaagctagcattcgcaacatcacgtgtctggtgaacgacttgcctgtgcattgccaaattgtactgaagaggttgatcaacctcatgcacttattgcagcaaccggaacattccgaattaaatggcgtggacgtttttacagcctccagtgttatagctccagtgattgcattcaagaaagactcaggaagtggcttgctctccgaacgtccgcgtggcagaacccattctcagtatcaagatgtacgctatgcagcagtgggtgcccaagtcgtggagcgaatgatccagcattatgccattattttccacagtgtgcgggtacaggtagtagacgcactcgagcgcttggaagcgaaaaaggaagcactgcgaatggtttctcatcagttgaagctcctgccacaaatgaatttcatgtccgatagacagcaggtgaatgagattacgcggttgtttcgcgggcatttggaaggcggcgacagctccgctttgcctgtaccaaacgatgctgtggtaggccaagtcgcagagggctcgaagccacaagtgacattggaagtggagaatgaagcgcagtcaaccgcagccttcaacttggagttagatttgcggcggtcttcagctgcaacaccacctactagtgctacaagcagcggagcgtcttcaccgacgacgagtgaaacgacagagcaagaccttgtgagcatctgggagcagtttggtttcaatcgaccaaccgttctgggaaattttgaaaagggaggcgtgctgatgctgcgcgcaattttatattggctgaagaatgactcgaacgcgctggcatcgctgcagatgcgtgcacttccgtctgagctgccgtcatacgacgcagggctggtggcatcatccatttgcgaaggactggtgaagcttctgaaactattgtacgtgagccatacccatgcatgcgtacttttctcttgatcaagctgacttttattgttatcatttcagcttaacgccgaagcacccagaaattgatatcgtggccctgtccttggaaccgttctgggagctgttcgacgaagacatgtacttcaacaagttgttcatgttcatgttccaggtgttcgatcagctctggagcgagcttgacccaaaggcagcatcatttacccgtgttattaccgagacggaagggatcatgaacgagttgctgaaaaaggctccggtcactgtcagcgacctgcgagcagaatgggcagagttgagagcacgccgcctggaagaagccgaagacgaagacgagcaagaggaagaagagctggtcgaagatgaagtcctccaggctgcagcattgtcagacccatcgctactgtcgcctcctctgagatactcgaagaagaaaccctccttcgatgtcaagccagacgactacaagtcaaagctgatggacacgtcaagcattttgactctggagcacatcgcctatatcgaccacgcgttacctatcacgagtcaattgtgtcgatggtttcgaatttacagcattgaggcagatggatcgtcgctggagacgctgcttatactggcacagaagcagagcccgacattgttggtggtgaaggacgcggagggaaatgtgtttggcggatatgcttcggacgagtggcaccgcgcgtttcactactatggtacaggtgaatcgtttctgttttccttcgcaaactcgagcactgcgggtggcttcgtgaagtaccagtggagccgcaagaatagctacttcatgctctgctcggacgagtcgctgatcatgggtggtggtggcaacttcggtttgttcctggtaagtgcatttggattcgtttcgcttgctgcaactggaaatctaaccattcgttttgcactttggcacatcaggatagtgatttgtcgagagggacgagtggagcatgcgagacttacaattcacctccactgacaacctcgcaagagttttcctgcgtccacgtcgagttgtggggcttcacgacgggggacaagcccgacatcgaacggcacaggaaaagtgtattggactagcagctaggaacggcggcacgacgcgcaaacaacgacaacaacacatcttatttactcgaatctggatgcttgatagcagcgatgccatcacgtacaagtagtgaaagcgacggcaataccagagtcgtcatcagtatgtcccttcaaccactacaagtcacagctcactgctgcgactccgtttggttgcctaagtaatgtattctggtaaaaaaaagtaggaaatgctcaaagccaaatcgccagctcattgcaagccgacgtcaccattggtttgcagcaactggttgttgagttccgcctcaaatctccggaacggagcttccactgcctcgcgctgcaaataacacgtcgtgatatgacaaggtttgtcaggaccactgggatgttgccgttcgagaccaaaacatacaaacgacgaacctcgtcggcggtgggtgtcgcgctcgcctgcaactgcggctgcaattgctccagctcgtgctcaaacacttcggcgaaccgctgcaaaattctctgcaggaaaaccttgagagcggcacatgccgcgtcggacgttcggtcatggaacagaaccgcctggatgttctcattctggagtgagatcatgacgaggccacctgcagaggactgtaccacggaaataatacacagtgaagacaagttagagtaaattagcgattactagttaataaggcagtggaccagttagttaccggcattgggttactccctgatcggtccttcttgtctgctctgcttgggtcgaagtgcgcttgcaccacctctattcaacatacagttagagagcacatacacaactccatattaaaagcgatccagtctcaccgccgccgtcgatctcgcgcgcgaactgcgtgaaggacatgacgagcgcgtccacgccctcagcatgcgcctgcgggttccacttccactggtgcgtgaacagacacacgcccgactgctggtgcagcaccttgagcatgcgcagctccccgagcagtgcgttcatcgcaggcaaatcgaatgtgcatacaaaaatcatatgatacagttgtagagcaatgtaatttgccactattccgattctaggttccaacctagagttggttttgtgcgctcatattcgacttgcctgcgatgaacgcactgctcggggagctgcgcatgctcaaggtgctgcaccagcagtcgggcgtgtgtctgttggaatgcatattgcaggccagcttcaactgcagcaagttgaaggatgagcctgggacctggactggtggtaagacatgcagcagtaggagttctcagagaaccaggtccctgtatgagaaaggggcaaaggcccgtaggagctggcagcagctccaccgctaatctatttacctttccttttgccttctttcgtgaagagcgttcggccgtcggatctggtacaacgtccaacagggttctgagcccaaaccaggggacttgctactgcacaggaagcgatccaggatggcggaccagctgaagttcacgtcggagggtgtgcccaagaactggaagggcaaggactggcaggcatacaagtttgcgatgcagatggtgtttcgtgaggcggagctcatggagattgtcgatgggacgatcaccaaagagacgctgtcggatgcggagagtgaggagaagttcgacaagaaacagaccaagatcatgcgcttgattgggatgtcgatgccgttggagatcttgcaccagattagggacaagatgacaggcacggaaatgtgggaggccttatgtcacctgtttgagaacaaggtgaataaaactgttaaggctcacactattcgtcgccttcgtgatgaactctggagtgtgaagttttcgccgggtggaaatatgaacatgcacttgagcaagatgttcaatatccggacctagttgcagacattgcagtatgcagttgatgatattgacatggttgagatgatgctggagagcttgccggtccaagcagagttcgagagcctgaagtcgtcaattcgctacagtgcagacactactatgttcacacctaccaaggtccgcgagttgattcgtgctgccgctgcccgccaagtcgagttccgtggcaagggccagcgtggaggacctcgtgtagggagtaatggtggggctagtggagtgattgggaggaagagcagagctgataatcagcatgaggagaaaagcagcgactccaagaagaagaaattgaagaagtgcttcatctgtgggagtactgcacatctcagagctgcttgcccatataggacgcatgaggcacgatctgcagtgtctggtgcagctggttctgtagttgcagaaggagctgaaagcagggaggcgactctgtttatggcaagtgctgctcacatcacatacattgaaggtgtgacggcagcgatccctactaaggttggacctacacatgcacggctgaccaatacatcgccatctcaagcggcaacgcaacgagctgcaactgcgagcagcgagaaaccgcaggaagatgaagtgagcgatgggaacgagtcgactactggtgtctgtggatccgccgctgcgttagagcaaccggacgagattgatgaggaggaaactcaggatgaagtcgatgatattgatgagactattgagaagaggagtccgtaattaatgacgatcaagttacggtggctagtgtgtgtagatcaatgactattgacgatcatgatgagtgcctgcaagacattcagtctgagcatggaggcggcgactcggctgccatggagttcgccaagcagacgggaaagcggacgcaccgcgacgagacgaagtccgaggagctgcgcgtggatcaggatgctgacaagcagctgccgaagcgaacccggactggtcttcgtgagtatcacgagcggcgtcgccctcgttatctggatgactatgaagtgaatgtcgcgcagtgttcggcccgaatcttggacaaagatggtaaacctactctggcgagcaatgtgaagctcccgaagaatcgccgcgagttgtacagatcgaagtaccgagagttctggctgcaggcagatttagaggagatgagcgcgctgcgtgccaagggagtgatcagagagattccctgcgaggaagttccggtggatgcaaagccgattaatacacattgggtgcggtctcttaagactgatcgccagggatatgtgattcgtttcaagtcgataattgtagctcttggaaactaccagagacctggaattgatttctccgagactttcgctcctgtcgcgagaatgtcctcgttccggatgttcgtggcacttgctgctgtgctacatctcctgctctacggcggcgatattaacaccgcgtacctgaatgccttgctggggatctaccagtatctcaagtcgattgaagggttcccctgcaagattaacgggcacatgtatgtggtggtgaaggcattgtatggactgcggcaatcggggcgtgaatggaacacggagttgaacaactggttcttggcgcatggctctcactgaaccttgcctgtactacaagttcggaacagactcgatcatgctcgtgcttgtctacgttgatgatattgtggttgcgaccaacaatgaagaggacaagtgcaagctgtttgaggagctgaatatggcgtacggcattaaggatcatgggcttctcaaggaatacctgggcattgaggtggaccagactgatgagggcatcaccattcgccagagcaagtatgctcgagaggtattgcagacacttgggtacgagaacgcccatgcagtgggcaacccgatggagacaaatgttcggctggcgcctttggatgcgagtgaggagtctgacactagctttgactatcgaaaggccgtcgggatgttgatgtacttggctacgggaacgagacccgacctggcgtttgcagtggggcaacttagtcggttcgtggccaagccatctgccagacacgtggggacactgaagcgtgttctgcggtaccttgctggtacagtagactatggcatatcgtatgaacgacctacggaggtgccaagcactattgtattggaaggcttttgtgatagtgactgggccaatgactctgagtcacgtaagagtactaccgggttcgtgttctcgctagcaggcggagctgtgtcttggatgtcacgtcgccaatcgatcgtggccctctcaacggctgaggccgagtatgtggccgcgtgtgaggctgcgatggaggcagttgcagtcagcaacatgttgcaggagatactaccacagcgaagtgtgaagctgaagatcgggattgacaaccaagcggcccatgtgctggcgaccaaccctacctacagtcgccgtacccgacacatcgagctgcgatggcacttcgtgcgtgaacaagtgcagaagggcgcaattaacctacgcaagatgaaaggtgccgagaacccggcggatgcgtttacgaagccactggacaagcagcgactgaaggacctgttgtggctcgtgggcgtgaccggtggcatgtgatgaagcaacctgcctcaagaagcgcattctggtggtcgaagtctgtacttcgagggaggcgtgttggaatgcatactgcaggccagcttcaactgcagcaagttgaaggatgagcctgggacctggactggtggtaagacatgcagcagtaggagttctcagagaaccagatccctgtatgagaaaggggcaaaggcccgtaggagctggcagcagctccaccgctaatctatttacctttccttttgccttctttcgtgaagagcgttcggccgtcggatctggtacaacgtccaacagataggactgacaagtcaagtggtgatggcgctaatgcaactgagcagaagcgtaagccacgaggaaatgtgactattcgacaggaggtccgcgaatctccgagcgcagatagtgacaacggtggctctagcgtggagatggccgcgctggaccagatgatacttgacgctggggtcgaggtggacatacgggatccagaacccgagagtcctggtgatgtagatgctcaggaagcgaatagtgctgaagctgacgatgcagttggagactccgatggatggtggttcttcgacactgcggcaaatgcgcacgtcacaggaaacctgttggacttcgaagcatttacggaggataccaatcagtcacagagcgtgcacggagtggcacctgctcttgcatcgcggattgcaggagtaggaactgtagctttggtgactgaagtggatggtgaacgacctgaatgatgtcgtttacgttcccggtgctgagcacggactcttttcacctggacttgccgcggagcaaggattcgactttgactatgagcatgatacattgaatttccgcatcaagtatgaaggtcggactgttatcgtggcttcgccgtacgaggcaacgtggggattctttgtgacccatcctgtgaatgaggggctagagctgccccgagacagaacaatgtgtaattttactgcgattgatggagttgcttcacttgcgttctggcacgagcgacttggacatatctgcccacagtatttgaagaccatggcggacaagggtctggtgaaaggactgatgttgacgaggcgcgagcaacaggacccttgtgacgcatgtcatttagggaagcagaagaagacaccacacaccaagaagctgaaccgtgggctgaaagcgcctaatcaggcagtgtatgtggacttgctaatcccaagtcagggaaatggcactcgctttgaggcggtgctagtgattatggatggctactcccggttcgtgaccgtgcacgttgaacagcaagtcgagcaaggtcatcaaccagcgcatacaaaaatcatatgatacagttgtagagcaatgtaatttgccactattccgattctaggttccaacctagagttgattttgtgccggcagtcgacgattccagaccgagcaacgatgagtggcatgaaggcgacctaccgcttccacggcgaggtggtgcactcgttcgagagcttcccgagcgccgcagaggcctccaacgagtacgcgccgccggccggagaagagaagctcaaccactcgtacacgggccagatggacggcggcaagcccatgcccgagctcaagtccacgggcccctacgccgctctggtcacgtccatcaaggtaatgaatgaactataatactacagtcaatgggaatggagatgaaagaatgaataattgactgtatgttttggttgtaacttagcgtgccaaggaggacagtgaggggttcctgaaggaccgcgtggaaggccctgtgccggcgaaactctacaaccagtaacaatggagcaacatgttcaacaaccaagtgtattatttttcatcagtttctaggtgaaggtcttgctttgacgaggaaagaccgcagatcaaaagctacagtgtcgacagtcgtgtgcaggtacatatcaacagctcatggaaattgtgcgtgggcgcgaccacccgaatggacaaatgggtcgcgcttggtgatgagagagatagagcgcgtgtggccggtgtctcagctgatgcagtttgtgcttactgctcggctccgctctcgtcgctctcgttccacacggggagcggcatgtgctccagctcgcggtaggaacggtccgtggctttatgccgcttcttgtagcggcgcttggcgtgaggcacggtggagtggaagatctttttgaggcttgggacctgcggggccgcgtgagtgcgcaggtgtcggctagcgtagtcagtgagcttggcgcggttgctgctccttgtgccattagcagcgacgatgccagcgtcggtcgtcttcggtgccttctgaaggtgtcgagggttggtgcactccgagcagaaccatgggatgccatcagggggcaccatggcgaggttggtgcagttgagatggaaggcggcagggcaaccgtcacagcaaatgagctcgcccgctaggccgcagcggaagcaagcgtcttcgttcaggtcattctgtaaagccgcacaacagagcagtcagacaaacggccacgacattatacaaataatctaagcgagcagcgtacctggtcggatttgatgtacatctgcttgccctttatgcgatcgatgaggcgatggatgcgatcggggttgatcgagctggacgacgggatgcgcttgttccacttggacttgccatttgcaaacgccgcaagctcagcgattcctcttgctcgtgcttgggagagaccaagcctagtgcggataagtttcgctccggtgggggcacgcttagatggaacgaacatggaccccccattcctcggacgactgcgtttcttgggtggacggcccggtcccctcttctttagcggcgaaggagagttcgccgccacttccgactccgagcagtggtcgacctgaaggaccgccgaccagtctgacttgccaccgcagatgtagctgtgtagtgccctcatctcgggcaagtgttcccctgctgtgaccttttcgtaccaattcttttggtgtggtcgcttttcgatgagatcgctcttagcaattgcttgtggcggcgtgagtgaaacatcctcctcggtcgttgtggagcactccgaggccgggctgcatgacggtagtctacggtgaacttcgccggtgttaacttctttatcgtcctcttttttctgccggcgcggtcggtgactgagaaacaatcggcagtatttgagtccatagtaatccagccagctctcgtccatctgtgagcttttgagcagcgccagggaggtcaagtgcacggggcgcttaagctcgggcggcgtctcgtccaccagtacctgctttttcgccttcgcggtgcctaccacacgaggattaaacgagggtaattttgaccgcttgacgcccagcttgcctgtgcacgccgtagacccacatttgcaatcggcggcttcaccgaagtgggagaagttgtagtcgatggtgatctcctcgtcgggtgcaatattgcggcgcgcaaaaattccaatacgctgcatgccgtccacattcctgttgcaacagtcggaaacatattagacaacaaggtagattcagccggtgctggtcaacacttaagacgtaccacttctgcgtgacgctgttgggatcacagcagtggttgatgaaacgcgagtcgttgctgcggtacttggcgtcaatcacaatgttcttctccagctccatcatgtagaaattcacctagcgtcataaaccaacccatgtcagctgcagttcacacctaaaaccaccaccacaatgcgctgagcttacctcgccgttatccctgtactgaatcattctgcgttcgcactcgatgtcatcaatcacctcgccgacgtattcaatgataaactctccagcgttgatcttctcgttggcaacgagcccaaacccgggtccaggaatatactccactctcaccgacttgagttccctcctcttgatcgctcggttgctgcacatgctcaggtccggcgcagagcacgtttcatctgagcaactgatgaacagcatgcggttgtagcaaccttcaccgcagtacaccacgtcctccgcttcgtgatgtttctccacatcagcgtgtcctctattggtctcgagctccttctgagccttggcgctcgccatcatcgtcgtgcgcttggtcgtggacttgtggatctcctcgtagcacgtgcacttgtgtacagggaagtcggccacgggcatcttcgtggacacgtagacgcagcggctgatcctgccgaagggcggcgggcggcgcacccattggcgctcctcgaggctcttgatctccgcgtccttgaagggcaattggaactccacgacgcgcttctcgggcggagacttggcgaatccgcgacgcttggggagcggcgggggagagggtggcaggcttcgtgcgtcgtcctccaggagctgcaggaagctcgcagtctccgggtccaccgtcacctccggctcggtctcaggctcgggcgcaggctccgcagcgaccgcgggcttcttctgcttgggcggtcgacctgggccgcgcttcaccagcttgggctcgtcgctggctgcctccagcttgcgcttcttagcggcggggcggccccggggtcggccaacttgcttcggcggcattatatgcacaactttgtatcagctgagaccgaggcggttgattggcgactgaatcacggggcgccaaaatcgcccgcgcaacgcgtgacttgaagtttgtatgtgtcgtgacgcatccccgtcgacttgcgagcgccaactttttcaaatccatacgggcgcgtgactggctgaaaatggggtgttagaagacacaccattggacgaaaaagagcaaggtatccgctaactcggtagatggctacattggttgacgtgtcatgcgtgacatatccgttcattgcggacgtctatctctctctacccatctaaagctgcgcctccctggcgttgacctcgtccagtgcagcggccagcgtcttgaccgcctccagctcggcgaaatccacctgcgccttcttgagcacgccgcggatgtacagccggcatgagtacagcgccttcttggtgccctcggccaggtagtcctgagccaggcgagaggccgccgagcacaggtccttcaccttctgctcctctcgctcccagccagcgacttgcagagcgcggcactgcttcaagcggcagtcgcgcgccttgtccgcacggccctccaagccgtcgttgaagtgcgcgtacacctgccacactttggcgtcgttcgtaatgatggacgtcacgcgaccaaacagcatcgccagctgcttcttgtagtgcgagtcggaccgaggaggcgtcgcgtccgtgaccgctgcggcctcatccagctcggccaggtcgtcatcgtcgtcttcgagctcgtcgacctcgtcctcgtcttcgtccttctcgatagctccggcttcggcagcagcctcctgctccatcttcttcagcgactcagggtacacgatggcctccacaagccacgccagcatctcgctgtcgaccgggcgcttgtgcttggcgcgcatgtccagcagttggtgcatcgcgtacatggcctcgccgtagcgtttggtctccatggcacagagggcgtagttttcccacatttgccacatgtgacgcttctgcttgagaccctcctccagcaccgcaaaagcctctgcgaagcgctggttgtgcaagtggatagagcctaggttgccccacgcctcaccattgtccggctcgagctgcaccacgcgcgtgaacgcgcgcatggcgagtgcccaccgatgcacacgcatagccaacgcgcccaaagtgaaccaagcaccggtgtgcatgggacccacgcgcacggcatcctcgtagtgagggatagccgcgtcaggttcgcccttctcaaagtagtggcgtccaagggaacgcttggcacgagcaaaccgctgcttcgagagcgtccaggccgtctcgtagtgcgaaggctcctgggtgaggtctcccagcgtgacccacataaatggcgtgggggcgatctccaggcgctcacacacaagcttttcagcacgcatcggcttgtccagaagctggtagcacttgacaacatcgtcccacatctcgagctcctcgcaaatttccacagcactgccaagaacaccaagcttgaagtagcgctcagccaggtcgcgcttaagggcataccgcggaggaaaggccagcgaatacacgaactgcatgcgctcacgagctggtgccgaatctgcaatggactgcagagtattttgcgtgatcgtaagacgcgttgtgtgctggtccaccaaggcctgcatctgcaaaacagcacgctcacggcgcttcgagctctcgcactcgagccacgcgcgctccagcagcgccgtggagtaaaccatccagttgttggggttttctagcacacgcgtaacgtaaggcatcatttcctcgcgcgtgaggccgtcgttggcgttactgttcttcacgtccagacacaggcccaacagcacaatctgatcgacgatctgcaggttgccctgctccgtgagtttgcggtcttcaaacgcgatgctctccaaaagataattgtcttggtccacctggtccaatttcacgtcgcgataggaagcctcgccttcctgaacaagcctctggatgtgctcctcctcggccgtaaggccatcagcaggtggggcagcagaggaatcagcgccattttcaccttcgggcgtcacttgcttaccgccaaagtccacgtgagtcgattcggccaccgctgcggcgtagatagactccttgtcctcactctcaggctctttcttggatgccgcaagcagcaccatctgagccagacttttccgctggaacttggtacgcttgcccaaggatccgctgagctgcacggtcacaccagatacctccttggcacgggcgaacgtcgactttccacgtttgttcttgtcgaagtggtgctgcgcaaggccccactccacgtacgcgcgagcgagcaggtattgcgtatccttctcaaaggcaaacagctcggtcgccttcagcgtctggatgtagccacggcgagcttcaaaccacagcgtgttcgacggctgcttcgcaagcagcagtcgttcgtgggccacagcagcacgcgcgttccaccacgcagccgacttgatctgctccagcatctcgccaagtgcgcggatggccgcaccaccggtaatctggcgcttggcagggccctccatagcgtcatccgacacctcgttgtcgttctcgccgtgcgcaacttctttagcagccaccgaccagtcgttgtacgcgtggttgcccacgaagtccagcaagcagcgaccaatgagcaagaactgcgggaactcgcatatggagaacggactttcgccatccacctgtagcgccaccagcgcgtcgctgtgcgtcttcttgtcgttgctttcagtcgagcacgtgataaggtgcgtggacaaatccagcaggtcacgcagcgtctccttctcgaacgccggtcccgtgtagttggcctgcacgtacatgtcgaagaaggcgacaccaatgaacaggatctcgtaggcggccacaagacggctctcggcgccgtcacattggcccagcaggtagctctgcagcgccgacgcaatgctcccacagatgtgcgcgtcctcgtcctcatcgtcctgctcctcgctgcgcagctgagccaaagtctttaggagactctgcgattgggggagacggatgacgtccgcgtactcgcccttgaagatgagcttggccattgccaggactggagccatgtcgtcgccgtccttgagggcgtcctgcgccgcgaccacgctcttaatgtcgctctccagcaccgcgtgctctaccgcaagcaggcgctgctcgagcaggtcctgcgcggcatcctgcgagctgtcgatggccgataggctcacgccacacagctcctgtatcaagtcgtcggcgtccgccatcgcttccggttgaaaaatgtgacttgcgttgaaattcaacttgagtggctcagaatttatgattccttcgctttcgtaagtagcatataggggttcctgcgaagtcgtcggcgtggacagctgacattttgcaggaaaagtacaagagcagcctcaacgggattaagaagtggatcaggagcgagctcgctaaggaggatgaaaacatcgccaggtttttcgacgctgatgatgacattaatctatgtgagtttacaccgagtgtttttgagcgttttctggtgttcaagagcgcctctgtgaagacggctacgctgagcgggtaccgaagtgctatcaaggatctttatcgcgtgaagcgcgtggcgctgcctcctgagtacggcgatgatatgaagcaactgttccccggtatgaagcggatggaggctgatcaggaccagactagcaccccaaagagcagccactcacgtactccctttataaggagttgtgcaattcgactctcgtggcgggtgaaggcgggttttcgcatctttttttacttcgcagtggaatttgatgtgtcgctcaatgtcggtccagactcttcaaagtcagcatctcgtggtgaaagatgatagcgttggagtaatatttgtgaagacgaagactaaccaggagggttcagggccccgtgatccacgccacctgtacgcgaacccgctgagcccatcaacgtactgggtgactgccttggcaatttatcttgcatgccaccctcgattggaaccgggggcactatttccaggctctaaccagaagctacgatttagcaaggtgctgactaaccttttgaagcaaggagacgctggtaaaagttacggtacgcactcggtgcgcaaaggagtggctacattcgcttgtggaggaagtacaggcggtccctcgatcgtgagtgtgtgtcttcgctgcggatggagcctcggtggagttcaagatcgctatttccgttatgaagccgcaggggatcaattcctggggcgagtagtggcaggacttcccgtaaatgactctaagttcgctactttaccgccccattttcaggatggccccgataaaaatgtgaaatcgtgcgtggagactatgtttccggttctctctcgcgaagcgaatgtgacaggaattttgcggttgtgcctagcatcactcgtgcatcacgcggaatatttgcaacagccacccatgcattatttgtttacaagccccactgtccttaggacgcttgaaggccaactagtagctggagagtctgtctggatgcgaccaacggggataccgccctatattgagctatacaagaagcttgaccagcagcaaaggtcaattgatgagctgcctggcaaactggggcagagaatggagcatgtacttgagaaaaagggtgtggcagcggacaatattacgagagagttattgcgtgatgaaattcgatcgttgttagacgaagttgggctccaacaacgcccgtcgatcaacgccgtagtgccagcgccagttccagtgcaccagtatcatgtctggggcgggaaatttcatgtgctacctagagaatttagttttccgagtatcgatccccttggggcatggatgctatggtggttcggaaatccaaagctcaactaccccccgtacaaaggaataccatcggacgacctggatacactgcagaaaaaagcgacgctatcagaatggtcaattatgacgcggcacattatgaatgggatcgaggccaagctggacgcacctatgccagaaatccgtgacaagagacacgctattgagcttttcaacattggatacggtacactgcggttagagccaagcaaacgtaagcgaagagctgaacagcttaagcttacaactgttttgagactcatccgacaagccgatcaagagcgaaacgaagaagacagtcagccgcccaagcgtcagagacacacaagccaatccgagtgcccgagattggcaagctagtagtagctataatcaaacagtacacccatttacattcgtgttagtacagtcgagctgatcgcagtagtgcaacggtgcgtaaagctagcaaacctcgctggcgtacagggtatcctaaaaccaaagttgttagcgtaagttttatagccatttagcaacaacaaacacaaacctggtagctcatgaagtcgccgcctagaactcggctgtcgactgttgcagtcaccgcttagtcgatgttgcctgccggactgcacgggacctctgtacctatgtatggcacttcaataaacttttagccaatcaaattgtgccttgataccgtcgcagaatccatcttacgttttcgcaagtcaattgaaagtagagaactttagaaactgaaatatctcatgacttggaaaatctaaaaaatctggataaaatccggatagattacggatacatagattacccggcagatgtttcaatactcaagtccagtggtacaaccgaagggtcgcgttgttccactggaacttatttttggatcaaccggatttcatgcgtttttgtcaattcttgtcccaaaacatcgacttagcctaaagttcgctagtgagggttctgatacctgaattttggattataccgatccctacttaacaattttgggtttagttacaaaggtattttttaaaagtgtacttattaataaaagtacactttaaagtatcaatgacgacaactaggctccgtgaggtcgggatagaaggattgtatataatcccgtgtttaacttttttttacaagactatgcttatcaataataaaaccaatgataatagaggtttattttgcagctcgtatgaagatcatatgctcatgtaagcgctagtgttattttatcaaggggagctgaaggttttccggtaggtctctcctgatcacaattttgctccaatagactagtgtcgctgatttgaccaatttcgtgttttttatgagtccatttcaatttgtacccatatcaccacattgcttgaaatcgctttccaaccagtttcgtgtcgcctttttgatttggttataatatggagtgccgctctgcgtgcatgggattagtagggttagggaaccatatttgaacttttagcaaataggacagcgtaaagataaccacagagctatttaattggatgaaattcaaaaacacgaactggtcgtactcctttaaggagtctccttagcgcaaaaattactaacatctcccagctggttggtcactcccctcgatagtgaccaagtggcctcaaagccaacaggtacattttgtatgacacaaactacagggaacttagggtttgtatgcaggccaaatctgtaccatcttataaacatattcagtcttatatctaccgccgttgtgggttaatatgtcccctccaaccagggacacgtgaacggttgttcacttggattttgtatactcctgctaagaagtgctgggtgtcccgtcacattaacctttcggtgcattttctggttccagggagatgcacaaattagaaggtcaaaggagtaaatcttttgacttgatgtatcacaggttcgaactgtagtagcagtactaactttggtgtctatctcaccttattcgaccgactggtgagagtcaggcaactgctacaatcagaattgggataggtaggtatacactcccgtgttttgcgtacgttgatctagggtaaaggagatccggtggctcattatctatgttcggcaaatcgtggctaagatcctaatgcaaatctgaaggtatgtgctacgaggacgtactgttcacactgtcaaaacttcaaaaacaccgaaactatacttccagcacaagctaagtacgattggcaccgagaacgcctgagccccacaggttttctacgaccaccactcccgcttggcaacctgcactcctacctggaattgccagctttttgaccaatggtgaaggccaaacaagacaaaattcacccaatcactatgaggggaaatgggggaggacaccgggctgacagcacattcgcttttgcatccaccgatctcaacgctaaaccacccgctacttcagcatgaccagtcacccgcgtcacccctggcagctcctggctgcggcgacaccgccaaacgacggcaatgctctcctggctgagctcaagaagcacaaggtagacaagtgtgacctgacgccgtgcttcgtctgcatgctgccagcgcctcacttcatgcgtttacaacgcctgctgtgtgcctgtaaggcctgggccgacgtctcaacagcctccgcatgcccatggcgcgcgagtcatgacgtgccaactttcattggtgatgacgatagaagaagcatacgtgcactgcaccctcgcccaagcgccatgcaagcccgtcctaaccccagcaatgaaggaggtcgtgaaggattgggccgcccagggtctcaagcccaagcgtagctacaatgctcttctgcagcggttcggcctcaccaagaggacggctccctctctagccacgatgcagcgcattgcgcaccatcacgtgactggacgactcggcgggagcgatctactagatgctgttcgtaaaaaaaacaaggatagaaggttcacgggtcaagaggaagaaactgccgcgttcacgttcaccagtcgcagcgaccggacggcaagcccatttctgggaacggaagtgacttggattcattcgtggtgggcatcagctccaagaagctccttcgtcgcgccgatcgagacccggagtcgttcatctttcatcttgacgctacctacaagctaactcaagtcggctatcctgtcgttgtggccgggatttcagaccgagcgaggcggttccatctcgtggcgatcttcatcgtctcccaacaacagcagcagcacttcgcggagatccttgggctgctggcgcggacgtacatgtcgatgacggggaagccactgcgagttcgctatgtgatgggcgatgctgacgcagcccagtggagcgcgattgacgaggtgttcggggaagagtgcaattacgtgtttctcatgtgctacattcacgtggcaaagaaggtttatgagaaaacacgctcccttcccactgccatggctgtgtcggttatgaaagccatacacaagatgcactttgccgccagcgaaccagcctaccagaaagtgctcgaagaagctcaagaagagtggtccaagagtcctgagctcaagcgattctcacagtacttttctaaagtctggctcaaccaacggctctggcgatggcagtgctttcacacgcctagtggattcgccacgacaaacaatccgtgcgagacctacaacgccatgatcaaacgagatgtgactctacgcagaaagctcaaggtgggtgctttaatcccacagctactgttgctgtgcgagagcgaagccgtagttgcacggccgtttgctactgcacctgaagctgatgcacgcctcctacgacgtgtgagggcgctgaagcaggctggtattctcgaactgacgtcgacaacgcgatgcactgtagcattcctactcgcaagtaccccggaagaagaccagcaagatgtggttcatgtggtcagccgggcctcgccgcgcgtgctggacgagatacgccgacggaccgttgaagatctacctgtcactgcccgactgaacaaactgacatctgcgatggagaattcaggcatgcccacatcggggtggcgtgtggacacgaagacaggtgtatgccaataccctttcgcgaacaaacacggttgttgcatccattccctctatgctttggaatgccgtggtgccatcgacaccaagggccgagagacgctagtaaaccgcggccccacggcccggaagagtggaaagcgtaaggcaggtcgcccacgcaacagcggtgttgcggttgctatggagtagctaggtggtgaatgtcacgtaatacagtcgtgtactccatatcgaagttgtcagggtgatttcgtttctgacctataccgtcgtaagctctttgcaatgctcattaaatacagcttagtaccacatgcatgtcagtcgaaagatgatagaaggaaaccgtgtcgaggctgcaccacaaatctttggagcagttgccgccattccgctgtaactaccataaccaattgtacctgatgctatcttgccttattcggtctatacatcttagcgagtaggttgtgagaaatatatgcgtacccttacattgttcgaccgcctaactttgaggtcgcggctgcggtatgactgctgtaaatcaagcattttcgttaaatatactgaagacgaattgtataactgtgtggcatgtttcattgtataagataaacgtgttgatagcttagaaataccgcccagctaattagacgtcacgtttccaataattgcggcgggggctgcgcgataagtagcagagtgcctaaacgcgcacttttattggttatattttttctagggaacagattgagctaatgacatcttaccaaaagtggctttaacttgtgccgaatttgactggctgctgcaatgtattcattacttcgatttgttgtcggggctgcggatgatatctaccataagagtcgcactctacatttttgcgtatctacataagtttcccagctaatcttctctatacattcgtttaaacatgtgtgtccaagatactttcacactaaagcatgtccaagtttttatttgttcgaccggggctgcgcagcaaaatggtccattctttatttttatcggccctccatcacgcaaaaagccgagagaattgacgtccacgctcggcttgaactatattgacttccagaaggaaggcgagctgcgtagcgatatgaatcgtacctgtcggtagcacagacgaccacacgcacttcatgttttccggcgtcttgggcttgaatactagtaggaccgcgtggggaaccagcgtgctcatgtagacgacaccccccgggcgctggactaagacgcacaactagttttcaacatccggttcagagtgttttccgttttcgtgaagttaaactcgtcctgggcgcactccggcctccggtagaacacccaaatcttgaacgtatgcgtgagcgatggcggaacgatggagacaacgcgtccatggtcaatgtgaataggagattcgcgattaccactttgtagccatgactcgaacgggtacacgtaagcttcgtcagccggaaagctgagcttcgtccggtacccaggtaacatcgctgctatctggtctcggagactcggtagcgcagcttcccagagtctctcagcaccccggcgaacaaaacgtctcatgtcctccacacgcagcagctgattcaaatgcgccgggttttcgggtaagcgatgttgcccccgagacgccgctacagcattgcatgcgttgcgaaacaatagagcaggagccttgctgaccacagcgcgctcccagcctcgtcctcgacgtagcgatcgatagacgctgccagcttgtgctgcacgcgatgcttcaagtacttcacatccccgtaatctcccggctccacaagctcacgtaactcctgaactaaatccgccatttctattactgttccaacaccaaaacgccgctcacgaagcctagatacgtgcacagacgcagcagtagctcacttacagtccagccagccgtagccctcgcacgcgtccacgcggtcatagccctcgcacgcgccaccgcagttgtagccttcacgcgaacagtcctctcgcgtgccacagtcctcttgccgccggtagtacttgacgcgagccgtctagactgcagtcttggggggtgggtgggtgggtgggggatgccgtgggcgtagcgctgtccgctcctgggggtagattcgcgtttgaatctagggagagagcggcggagattagaaatgtacagttgaatacagcacctaaaactaatatgtctccgacagtaatgtgttttgtgtggaggtgagagcagagcaagcatcgtgccttttttgtaccggtgctcgagctgattctgctgtgtgacattataattctgctgggtttttggtatttgctcatgtgccaccatccacgagcagtgcacctgaaacctcatgagtgcgcttgcgaatttgtcgcagctcacatgtaatcgacgaggagtgcgaaagtggtgctaccacagctccacacattgaatggataataatagttttacttcaaaattcgtgcctaacttgtactctgaggatttcttcatgatgatagaaaaatcatcggcatctgcagttactgtagcgtaatttcaacctcattgtagtgttacgaagcactcccgttgagcgcgattttgccacaattgtgagccattttagcctatcagttcactcctcaaacgagctgatcgttgggttgtacttttccgagggagcagtagatcccagctcgtgatttgaagtgatcggacagcttatcgctccttcgtatctaggggtgtgggacgcttgaatatgtgtaaattctagacctgcttcgttttgtaagactgttttagtgttcaataaagcaaggcagctgtatattgattttgtgttaaagcaaacttaaaggcatagagagttaagctacctaccctaactgcatttcgaattcagaaggatgcagtacagccgcttgcacacagggaggaggtcctccggaaactgcgtccaatcgtccggcactccagtgccggtgaagtcccgacgaagagtgccgccttcgtgctccacgaacatctaattctgaaagtcggttatgagcgcgtgaaccttctcgagttcttgaccgccgttgatgatccgcgcggcttccatcattgcgaggagttgatgttgatgcttgaagatgtcgtattgtttcgcctcgattacgacaagcatccgtttcccgcgagcgctgacccagttggctaccccaccggccatgagggacgtaccttggatcgtgtgctctgggaggaggtcgagcttgcccttggtcttttcgtgttgcacattcaccgccgcaacgatgggggtcatcagggcatcgataaaacgtcgtctctgagcctcctgctggttccatggagccttcccggacttgaccagctctgcaaatctgtccttgatcgtcttgatgagttcaaccggcagctctttctgtttttggcgaaagtctagctcttgaacgcttcgaagcatgcgcttggtctggtgctcggtgaaatcggagaacgccatgcggtgcagcttgaagttgtctccttgttcgacgtcggagtgcttgcgcttcttgcccaacacaggcgtcccgcacgagaggttaaaccggcgcaaggccttcagttgtgcctcactctcggtatctacgacgtcatctccagccttcgaatctccacctggtttgcgttggcctagggcagttgaagtttccgttccagcaggcttgatctcttcgtcgggttcttggtggtcggatgtccccgacgcgttgttgtcagtagctcttgatagcgtcaccctcagatggatgtggccctctgcacccgcatcctcaaactccatgccgatggagttggtgacaacggttgccctagacgcggcgctgctgacagttgcctcggttggccagcggccgtcggtcttgatcatcgtatgcagcttcagctgtgctgggacaatgtcgatgccgagcgcggccttgatctgctggcacagcgggatacgcagcgacgcaacaggtgtcctcttgttgaagttcttgatcacgcccacatattcgttgtaaatgaacgaaatgttcacggccgacgtacggggcgcggtgtcggaggttgcgagggcaggagacatggtgacttgtggcttgaaccgctagagatataatgtcgagtgtttctagggttgagctgtagttgtctaccagtcattatccatccattaggcacatgaacggtttatgctggacgcgaggatttcccttcgcgatggctacccccctccccatcttcatggcagatttagggttctgtacattttacggtgagtttcttaaactgtcgtcagtctagcgctctctacaatgatctctctccatccatccatctgtctcttcctgtagtctgcctttctgtggctcgagcaatccccattcccccctgaggcttactttatctttccgtttctatctgactctctctctatctcacacgtacactctctgtgtccttctctctccggctcgatctgtttctgtccgactcatatttccgtctgtctctggtcctataccgtattttagatctcatattacagacagatctcttacttcatagcagccattaaccaataatatcacgtcatttgtccagctcacaagttgagctctcataatacgtagggtaaaaatatgacacttttggcagaggagggtcacttactgctagaaaaccgccatggagcgcacgccgagtccgcgaaaagtgatggctcgcgctccaggtcaacagggagggtgcacgcgtacaacaggaacggggaaggcgccgaagcagttcaaacgtgtggctgtttcgtaccaacacaagctcagtgtcatttagttctatgatgcggtcgccacgaaggaaacgatgcacgccactgtcagctatttctacccaacgctcacggtagaagaaattaatgcaaaaaagcggcaggtctacaactggttaaaccagcgagagctcatcatcgacaaatgtgaaactgggtgcggctccactgtaaggacaggaagtcaggcatgtcagcgacacgttctcctgagtttgatgagcagattgtatagtggatcaattcgcttagggaggagagcatccccgtgacaggtattatggttagaattcacacaaaggacagctatgagagtaccggatctgccgagatcaagttcgcggcatcgcagacatggctgctttcgtttctgaggaggaacagactgtccattcggcagtgcaaacgtcagagccagaagatgccagaggacgccgctgccgtagcggaagaattttgttggaaggtgaggaaaaaaatgagtcagcttggggtggacagagtttataacgccgaccaaacaggaaagtcaatttgcttgttttgtttttacgaatgtgcaactagtatgtttttaatgttcctgttagcaaaacaatacgaacatttgccaacaaaaactattgccttgactggatccagaactgcctggatgaaaagcgccggcaaagacaaagaacgcatcaccctcatgttaattggagacagtctcgggcaaaagtacgaccctttcatgattttcaaaacgaaatcgtcgacaatccctgagcgagcgtgggaaaacaaagttttccagcatggatttggcgctcatctctggcgtgagctgaaaggagagcaaaatgctgttcaagtgtatggaaacgatgcgggatggtggaatggagacttgacgatcgaggttttgatttatcatttttttcaaccgtcctgatatgcacgtcccgatattactgttgttgggcgacttttctggacattggaggaaggacgttcaaatatttgcgcggctcctgaatgctgagctcatgccgataccggccgggtacatgtttgcgtgtcaaccggccgatatctcctggaataagcccctgaaagactttttacggaaaaattgggtcgagtatatgctgcagcaacttcgaaacagcagggctctcctaccgttcaagctgaagccgcctacaagacacgagctaatatcctggactaaagcggcatggagcccgctgcaacaaccggtgattgtaagtggctttcaaaaagccgtgatcgtgccagaggaagtcaacacagcgccactgattgacgagcagaggctgttctattctgagccagactggcagttgttcaacctacttcttgacgaagttcctgttgtgcgccatatagtaaatccaaacagagatatcgacactctctcggcggtggcgcggacggatagttggtcgagttagagctctcaacttgaatacattgcatgcacttgacaatgaacataaaatcgttggtacatgtacatctcgtgtccactttgcaacactacagcttcaacactacaacttcaacaatcacctgtatgaagtatgagatctcaaatacggtacctgccacgttctggctctgtctctccctccggctccatctgtctctctctttacctctttcgggtctgagtgtctaggtttttgtatttggccctagcggcatcttttcttcgcaactatatatttatctctgtctgtctctgaatcgctctgtatagatctgtttccccaggggtgaagtgttaatataagtgaccattgggttcctggattgcttttgccctatccatcgagatctcggtgcacgttctagggttaatgttctctgtactatagagattggtgagactatagaaaatatcagcatcccacaaacggtaatccctatcctcgtacagacagaagggtaaaggatttgattaaaatctagcgtataggaagattctacttatgtcttcgcgagttattaatgaaaataacagagaagtgcgctctgcattgggaatttatgacgtcgcacaagatctcccaaattcatctggaagagcatgttgcaaaagtgacggtgtatcgacacctttatgatacatatagagttgtttcagtataatgtttcctatgcaccaatattctcctttctacaaattcttctttcgattgactcaaattcggaccgcggagttacgagaagcatcatcatgaaggcaaaattaccctaaatgaaacattgatcgcacgattgcggtcgctgttctagccgaattaataactcaggctagtccaacacagggagctagtgtatataaacccaagtgaacagccatttacttggagtttctcgtggattgacttacaaagcgtgaactctaggccgaacatattaatagggtgttacagacttggcctgcacacaagccctaaaatctacagcttttctcatacaaaacgtatatgttagctctgagggtgcaccacttggggtactatccagaggagtgactccgttcccctatatccagaggagtgaccccgttccccaatacacatagtggaaaatgactggtttagggtttaggtttaggattgtataagccttctgaatacaatgtgtagtcatatttcataaacgttttttagggtcaagtattgtgctcacttttggcctctccgatactaaattaccccttctcaagggttgtgggatcgccaaatcgtgattggtgttttcacctccaagcgctcgcctaagcaaccaatcagcagctttgtcgatcatcatgcatgcgtgtggtgcagctattgtgcgttctagtcgtagttttttgaagtcgattgattgaatcaatccagtcaatccgccagcaaaccgcccgaggatttgatgtgacctgagtttactgtggaggtaataaagtacgaaataagaagccacagaggtctaggtcgattcctaaacacttaaactgtattcagcgatttcaaccccattctataccgacctgaatcggcattattagccagaataaacctgccggcttgtatcaacaagccggcagccttaaacatactcggggaccctagcgcggaggattgacatatgctttatttaaaacgtataatataacagacgaacttcagtaagtagctagagcatcactcactgagtcagtgagtgatgcgccagcgttctatatcaggccttcacagtaatgggcccattctcctctcccgctcatcccaattctcacccaatttcttcccatcctctctttcaagtgtatacttaaacagacaatatgagaatttgcatatactcgtagtagtatccattctcaatctgtgatatttgttgtggtttagaataagtaccaacttttgacataccgatcggagtttctaatatcggatagaaacagatgcatgaagtacaagaacttgattttcgtaaagtataataagaataagtgaggttactgagctccaccagtttactagggctgtaggaaaagcgaacacaaccggatgaagagctggagtcggccccactttcaaattggccctccgtctgacggtctacaactacaactacgctcaagacaacaacaatattgtacgaatgaaaaaagagcactcgccgacacagaaggcaaccctagacgagaagaccacctagcgctcttccggggtttgcagtagcgcgcgggtgagccaaagcgtttaccctcgaggacgatgtcgagcgaagtccacgcctacgaagaactacggctgaatgagacgattttcgaacgtgctggcgaacctgtagcccgaggagatcaagactgggctttctgctctcaccttctacaagaatcgctgatccaagtcaaactcagagcagcgggtggtagtctcctcgatggccatgaagtgtgtgtggaggagcgcgtgggagtccatgcagcgttgcgtcaatttacattgaaaaaatgattgagatttgccgtcacgctacaattttaattgtacaatgtaggcattgaattgtgtacttgtggtttatataggggtctgtatggatcatttgattggctacccacgcacatacagttatcaagtcaactgtcttgtacaatacaatcaaatcattgcagccattttctaattgcaattttatcaatagttttattgcaatttttatttacgcaacgctgagtccatgggatgaacgaaaggtttcggccaacaccttgcgcttcactgcatgcgagctgaccgacattagctggacggacaagacttgcgagagggatgctgtctcgcagcctaatgcgtgtatgcggaggaggcctaaggtagggttgtgcgcagggagacctaacgtgtgcgcgtgtctggggagacctacagggtgagcagcactctcctcgcttctcactttgcagcttgcactccacaagccaaccccgccctccccgctcccaccaccgatgtctccccgggacgtagacgccgttgactccgacggcttcgtcatggtgaacccgacacagccaactgcggctcgccacgagaacggatttgctaacgacgacgacttcgtcatggtggaataccctagtgacgaccccacgcatgacagtgactccacggttacgctgtctctttctgaagctgccgcgcgcgagcaaaccgagatcgaagcgggggcggtaagcatggctcgcctccagccattcgagcgtgcaactccctcggactccccggccggagccggaacgcgctacggatgcaccgatagacttttatgggctcgtatactaatagggtcggtggatttggtcggacttcgcctgggtgagctcctcgtttgcaccgccaatttcgcttcgctcatggcgggcaaggcgtcggtaaaaagatagtaactcctacttagacatacctactccggcccacgcgccgaccattgcagacctccgcttcgttgcggttgcaaacggtctctctgagggctcttgctgctgataccgcaaaaaacaccccaatgcaaatcgtgtttttttatcatgaccatactttggcccagtgtggcagctgagcggggacggaggtcgcccacgccaaatctccaaagttccacgagtgctctaggaaacggaacggcctgaaggctgcacgaaatatcattaagtgaagttgggctcgttggaaagctaaagggcaaggctagctctacgatgagcccaggcttgcctatagttaaggaggccatgggcgaatttgtgaaatcctggaaatcgctttcacctgcccccctcctccggctggcaaccctaacccgcattgagacacatagataatcatacaactcacacagttcgtgataccgcaaaacacacttagcgctatagtcttgtggtatcagcagaacttctcctctctgaggcctctctcgacagtgtttgatcgttctacaacactataattgtgtataggcgagcccgaccaaatccaccgacccgatcagtatacaatgtcaatgtcaatgtattgcgtgttttccgtaacccaaaaacactaagctagactctatactgctagtcgaagcgtaaaatgagtgaggcaactggtactgtacctacaaatgggtacggtgtaccagtgtacctttttccgcatacgccaggaaaagtgaggctctccgtgcccccctcctcatcatcctcgacgaaaatggcgctcgccgcgtcgctctccttcacaggtctcttcgtcaacgcctggaagctgtcggtcctgccatcgatcgatgcccacagcttcttgtgccttgatctgtagtatctgttccgtcccttgcacgtccgctcatcggtcttcagcatgttcagcgtagcctcgcaccttgatctgtagtatctgctcttgtgccttgcgctcctcctgccgaatccttcgcccgccttcgtgttgagtacaaagtcccgttcgggagtccgccctacgccttggtcttgtcgcgcgtccagtgcaccttcctgggccatgccgttaacagcccgccagctacggcgaacccggtcatagcgcgcagcgaagccttctgcgcggcaagtccttggctacagcttgccgccacctcaccaccttgcccacagagacgtcctcacgtgtcccgcagtggactagacgctgcccgaaggcagcgcccgcagagcggccgatcagtatacgaccccattactaatctacggatgcgcctgccgaaaccccaaccggagctggatccgcggcggacggcgacaaacagcatgctgcgactcgcgtcctcgaaggcgctccacacgctgcccctatcgctcaagcggatgcagcgcgtgatgcacctgttccttccgccccaaggaccactcctcgagtgccgacccggtcaacaacccgacgccggtcgtcttctaccgacctggacggtgacgaacctccgcgtactcgccacgagtttgggctcccccggctcgtgtccatgctgacaccaccaaccaggagatcgtggcgatggcgaatgcggccatcgcctacatcaactggaaagaggctcgcacgaccaagaaggaagggatgcccgacgagaagggcctgtacctcttcgagctagatctaccagctcgcatggtgctggagaagctgatggtccctcacccggaactctacaagtcgtggggcagggcctgtaagtttggaatcgcgaagcggtcgatacgggtgcggtccaacacgcccctctccaagaaggacgtcgggcgagtcatgcgccgcgacctgatcttcatggaggcaattgctggaccgttcaccgatctcgagctcacggccatggagtctagagtctaggctgaagcgccttctcctagacaaccgcctgccagcaggcgataataactccgactggaacgagaacgtcttccacgccgacaacttcgacgtgattcgcgacgccttcgacaaggtcttcaatgaggctcgtgcacacgagtacactcgcgtctacgaggagtgcgtcgcggagagagatctggcgcgtgatcgacgcgaacaagcgtgtctagcgcaactgtctgacgaagaacgtgctcgagaagcagtcaggctggcctggacctcgccacagagtcacacgctcgcagaacggcagaggccgcgcaagcactccacatcgagcaagcggcaagtagcgtcgagaacctccgccgcgatgtcgacgagctgcgtcgcgatctcgcagccacgaccccaacaaccgccgagattcaagcatcgatcacgacgctcggtgaaggcattcacgaggacatgcgtcgcctgacagcgagcttgatggctcgcttccgccgccaccaacgagaggagagagtgatgtacgtctagacaacgaggcttgttagctggagttacctgtctagctgatcagcatgtataatttcacttggcgttaatacattaaatgtattaacgccaagtgaaattttctcttgaatttcaaccaagtcctaaacaaatctcgctgtcttcttcactcagaagagctatcgagcttgtaactgaggcggctcaactcggtcggtttgcaccggaggttcccgttggcatggtccatgaagacctactaggcttcgccacgcgaccagctcggtccctggatggactcctcaagctcgttcttctctctattgccccaagcagggtaacagagaggcgctggtagcgctggtggtggcgatcaagaagacaaaggcacctcaaagcaactggaacgcgaagctgacaccctagacgaagaactcgacctcgacctgcttccctgcgaacttgatcgaatcgagccctagacgaagaactgtctgcatgcacgtgtgtagtggcaacttcagctgcactcagactgtggaggaggtaacttaaacccaccgagatcatagcagcgattcgacgttttcagcaccacttcaggacgacgaaccactcgcaagcaacgacttaaatgagtcgtatcaccatgcaatggcacacagaagctggtcgtggaggtgtccagcaccggaatgacaactccgtgcgactcggatgtcaccgccttcttgctaggatgacattgctggctagaccctagatagggagggacctcatgctgttcgcaaccggtgtctacctgctttgatagtcgtgcatccgctggtcgtcggacctctgcagtacttccggagcgcattccctaggcagcaacttccgcatcacagcagaccgtgaaagcaagcgctccgtgaaaagtgcgaagtatccgcagtcaccgctaaaccaattgttgttcttgatcattcaacaccacccggtaacaggagcttaatccagtcttgtcaagtgcactaaagtacaaataacaaattactttcacctctgaaaagttccgcgtcatggcaaaattcaccgttcattgttgagatacctccactccgagttgcagtgtggctaccatttccttgcatgcgccgaccaccgtcgaacgtgaggtcccagcgaccctccttcgcgagatgtaggatgacgatgcgctcctttcttccaacactggcagcttcagatgctggcccgggttgcgcagcagcatctccatgacctataccaagatgtgctgctctttcgctatatagttctggaatacactcacctgccagcttctgacagcaagagccatacagcaggagcatattagaacaagtagtagatcatagatacagatatagtaatgcagtacttagagcatgatgcggtgcacgttgaacataaggcgagtctcggtccgcggcgtccacagcacctctgcttccgcataaagataccgatgtaaagtgctgcgtggcctcgtcacgcgtacaccagtcgaagctgactaccgacccgggttgcgcaccagcttctccacggccgtgtccaagttttactacaccttcaccatgtagtacagacccgcgctccctagtcaactcctggcagcagagcgacgaaaggagcatattaacaacacatgtacacgctcgggcctcaggcttcttcgcctcagcgtcgctcgacgcgactcgtagcagaagacaaagttgttcgattactataccaatgattgcggccgtagacctgccataaaaaacatagtttgtcataaaacgaacattattgagatgtaaaggtttacagacaacgacgatgaaagacccccgacccaaaacacgccatttcgacatagacagacaggggtcggtggttataatttccatcctatttcagtatacaagagaattgagttacccaatcagatctgtcatttccctttgtttctaccaatgagtatcacgttagttggtgccaaaaacgaatggactcaggatgaactttgactgctacggtgttggcgcgcttcatttccggtttgagaccattatggtcacaacaccgcgcaagcaacgctcgtacatcatagcagagaagcggggagcgcttcagctcattgatgctgttggagaagctgctgcgctgcggcagttagggtaccctcgacgtaatctgcgcgattgggctgccaaaaaggccaagatcttcgactaccgaggcgctcagactagcaagacgctcaagggacgaggtaggaaggaaatcatccccttttctcatgcactggtaacgtttatgaaggatatgagacgagatgaagaggttggttaaggttatcacaatattcacactgttgtagactaatcgggtttttatattgtcatgaagccactttgcacgcagtacatgcttaaatatatcaagctgaactatcaagattggcttgtacagtacttagagtcgaagaagagtgaagaaagcgggtataatgcaataatgagattgctgcagaggtttgcaaaacggtacgatgatctaaatgttttttttgtttttgatttttttggggggtagtattgataaataactatcaacttttgtataagccatggtttttccgtgcagatggcttaagctacaaagaagaaggaggctgatttggagataactcacgtggagtttgctttagagttttggcaaaaacacggattgaagcactcggcttcagaaatctacaatgtagatgaaaccgccatctactaggacacgccccctaagaagatttgggccgttcagggtcgcaagggctctgcaaaggttcgcaagactgaaaagcacagtgccaaaatgacggcagtcctaaccgctcgcgctgatggtacgtttagtattattttttctttttcgacggttaagttgtttttactaactgaggtttagacaaaaaaaatcctattttgtttattgtgcgtgttaaaccagggggtaaaatttaggaagaagagctgaagacttaccctgcgggacatgtgtacgcattccaagaaaatggctggatggatcgccatgtctgggtacggtattgcaaagagctcctcaagtttgaggtagacgcaccctctgtccttctgttgggcaacttcgactgccacgtctcggaagaggaacagagggtggttgcagatgagaccggggccaccgtggtgccgcttccggcgaacagcaccgcggtgtgccagccccttgacgttggtgtcatggggcctctcaagaagagcttgagagcgctgtggctcaaggagcagtcggtgaagaggaagaagaagcaggacaagaaggagcaggagaagaaagagcaggagaaggagacgcagggcaaggagaagcaggacaaggaaacgcagaagaaggagacgcaggagaacacgaagccggtcaaggagaagcagggcggctggaaggaaggcacggaggagcacggggaatagaaggagatgacggcagcgcaggacgatccggcgggcgagtgtaagagcaagaaggtggtcaagaagccgaggggcaagacgggccgaaagtgcgccaagggcaaggacggcaagaaggttaagcaaagtggcaagggcaagaaggacaagaatgtcgaggatgacgaagacaaggaaactaccaaagagaaacgcttagcgttgatcaagcgcacgatcgctgcgtgggagctgatgtccgcggatacaatttttgcggcgttcgagaaagctatcccgaagtttccgacgatgaagatctaacatcaatacatgtacatgcttttttatgtttatcatatgtttatactagtcgaattatatcctaaatcagtctatttatgttgctttggccaatcagatcgctttatgtaatgatggcgcgtttcatgtcgtctgtcggtggtgcgaaaatcccatacaaatctccaccaagtggtggttcgttgtctgtaactcagacgagatcgaaaaaagttcacgttaccagctcgtcatcagctaggtttacgcttctctcaaacttagcgataacgctgtattccatggtagaaccagggaattgtgttttccacttcaaaatagtactttcgatataccggtacacaccggtattataccggtaaccctgaccgcccacagtccaaccgatggacgcgtggcgttctcccctcactttgaatcaagaccaacaaacaagcaagcaagaaggggtccttaacctctcaagactacgtcatgatcacccgtggaaccaccgaccaagccggcgcccccagctcgccatcgcccaggaccgagacggccccgtcggacagcgagcgcccgactgccgtcgctgccgcagactcagcccctcctgatgttgtggacgtcatgggcgcggacgaaccatgggcgagggcgcctacaaggcgcacgtccgaccccgccccgctccgcacgagcaagcgggcgacgtcgaaggtagtctccggtgaaccctcacggaagctcgcaagggcaaaaagaagctggtcaagcggccgacagcagcgaccagcggcgagacgccacggaaagcggtggccgacggcgggcacgactccgactccgaccaggaggacaaggcgccggcgccgcctgcgaagaagccgcggaagactacgactccagcgaagacgaagccagcaaaggccgcgacgacctcgatatgtgcggtgccgacgccgagatccgacggcggcttcgacctgaactccttcatggcctccttctcgcccggcactgcgctcgatgcgaccgttgcgcccgtcgaacggagcacgtccgtcgctacgacccccaacaaacctcggtggcgaccgatgacattgcccctcaggacggcattgctgttcgtgaatcggtgcgtgagcgggaaattttccgtgagggcacctgttttgcccttcgtccgacctcttccaccaccggaacaccgacttcaccaggtagccacaagggcaccagcggagccagcgccgcttgcgctggcactttgaccttacggtccgggtcggccatacagccacctacagctatacagctacctttgactatacagtccgggtcgaccatacagtcacccacggccatacagccagtactggccatacagccggtacaccaattaaaccatatacgtgaagcgtcagctctgactatatcacaagatgttaggtgttcattaccacgtgggagtgagttgagaagcgctgcgactcagccggcctcgcggataaccggctcgccggggtcggcatcgtgtactccggaccaaggaagtgcgggccatcctctagaagaagccaagttgcgcaacgatatcgcgccgcggccaagctacctgcgccccgtcgtcagcgtcaagaccgcagcaggcatgcacctgaacgcccgtgcccggagcgatttactgcggatgtctcgcagagctactcttgctcaagctatggcaaaatatggcatcgcgctgccgccggacaattatccgctgtcgcgaccaggcgcggcgggacccgagttacttctggacaccccgttgcaaaaggcgctatcagaatatgcacgacagtcgggcatgatactcccagcttttgtcgagctggtgcgcggacagacggctgatgactaccggcctaacaagaacctggtcccaggcgtgctgaacgaagtatgcaagggttacgcacatctggaagagctccagagaatcgtgcagggcggcgttgaagttcggctaagcaagacacctccacggcaggtacagcggccaccaaatcacgggtcggcgcgagatcgccttaatgtgctccgcaagaacattggaaaggagcaggatgctgggcggtgcctcgtactcgaccgcgatctcctcaagcaatggcccgagattattatcagcccctttggggtggtggacaagggcaatgaggacgaaaaacgtgtcgggtaggacgatccacgatctgtcgtaccgcgaaggcacctccatcaacgactacacggatcaggacagcatcaccaagccggatacactcactgcgaagcggtggcggccgaaatcctgaggtccaagcgcgctcacccaagggcccgggtgtgtgtgatggctggtgacgtggcgtctgctttccgcaacatcagcattcacagcaacagcgtgtatcttttcaccggccacatcgaggaggacgatgtcatcgtgatcgagctcgctgcgccattcgattggactggatcaccgggtttctacgagattgctggtggtgccgtcgcttacgtgcacggttcactcgcgactggcgagtacccgggtggtgtcttcaattatcactgggttgacgaccacaccaatgtggctgcggacattggcacctcctgcgaggacattgatcggtccctacggtacgctatggtggcagtcctgggagctgacgctatcaacactaagaagttcaccgactggaacacgcgccagcgtgtactgggcctcacgttcgacacggtggtggaaacggtcacgatgccgacagagaagataaccaaggcacgcagtattgtggcggctgcgtactctgcttcatcactttcaaggcaagcctaccggtcgctgatgggtagcctccggcacgtcgcaacatacatacgtgctgcacggccgtttctccagcgtctgcgccgacgcgaaagttatctccagcggtttcagcgtgttccggttacgccggacatgcaacaagacctgaaatggcggtggtgtgtgctccacactccccgcctgaacggcgtgtcactggaatacttcaatgctctcccagcacccgacattgtagtcgaaatggatgcgtccgattatggcctctgcgcgctggatgtatcatcgcaagtggccctcacgtaccagttctcggacagcgagcgtgccttgattgcggcttttaaggatggtacgctcaacggcttcgatatcaactttcaggagctgctctcgtgcgctttcgcggtccacgcatggggacgccggtggggctccggtgcctcgcgcaacgatcgcccacgccacgttcaattttgcatcgacaacacttctgcggtcgcatggcaaaacaagctcgcgtcctgtaatccacgcgctcaagtgattatctacttagctggtgggagacttcgttccagcttcggttttcggcgtcgcacgtggccggctctgacaacgaacgcgccgacgctggctcccgcatcgccgctaacccatcgtatgcggtcaaattctcgtcactaactcccggatgttcgcaggtttcgccgactgtggatattcaaggtctgatcgatatctcgcagcgtatctccgagcgcactccgttgccgactccacgttcgagcaataccgccgagccttgaccaagtggacgacctggacgtcccgccagggcattgcaccctcgcttttgggcatgcctctcgctgctcaagtgcagcacatctcggattttattctccacggctttcggtatggcttcgggtccggtggtcccattcgcagcgactcgatcatggccgtgctcatcggtgttcggcacttcttcgcggcatccggacatgacttcccgatcgcacacccgcacattcgtatgctgctcaagggcatcagccgtctcgattcacctccgcaccggaaagcaccagtgtcaatcggactcctcgaggtgtgcttctgcaacctttcaatgactgagcccttcgagcaagccttctggggggggtcatgtgcctggcgttctttttccttcttcggcggtcggaaatcgtggcaattactggcggttcgttcaagtggtttgctgttcgagctcaagacatcacggttctggatgcggaaggccagccaaccctgtccccatcgaaggcacagtcggtgtgtatgcgcctgatcggctccaagacaaaccaaggcggctctcctacaacgaggatgttgtcgcactcgggacatgccccgtgtttggtgccttgatccttctccaagtccggaaacacctacccgctgatataccggctgcagtgtacctggactgctgcggaaaaccggcctgcattgcgacgaatgatgtgttagaagctatcaagcgggcggctaccagcactggcgaagacccacgctgtttcagctcccattctctacgagcgggcggagcaacccacatgtaccgagctggcacggatgcactcacgatccagtttcacggccgttgggtttccgatgcgttcaagacctacaccagactctgcaaggggtcggttgctactctggcggcaaacatggtaacaggtccgcggggcgattcgacgttgcattagtggggctgattgtatgaccatttgggggcaccgcgctcctcgtcccttatcggactgagctgatggtcatcgcataagctcccattaatgaaacttcgtttgacccccaatgtagtggaaagctgtattccatggtagaaccagggaattgtgttttccacttcaaaatagtactttcgacataccggtacacaccggtattataccggtaaccctgactgcccacagtccagccgatggacgcgtggcgttctcccctcacttcgaatcaagaccaacaaacaagcaagcaagacccgcctctcctcgtcccttatcgggctgagctgatggtcatcgcataagctcccattaatggaacttcgtttgacccccaatgtagtggaaagtcttcatcttcataattccaaggtatcactcatataaaacctagcaaaactgattttatcgacctagaacttgttagattttattacgtgcgatcctattggttaaattcacatgagtgtttatgaagcgacgaagatttgaaacactgttcacgaaaatgggattcttaaataggtacataaagctacaaccccattttcctagattgcattttgaaggttgatcctatcgaaaggcatatacctaccaaagtaggttttacctggccaaaagcatgctgctgtatcggcatgagcacagtattttcgggaagacgaaggccatggccgacatggagcatgaggaccagctgacagtcacgccggcgcagaagaagctgttcgagctgcgcatgaagatgaacgcggggaggaaggccaacaagcaggtaggacggggcaagcgaagcagctcgtgaagctgtagaacgccccggcgtcacaggtgtctgaccagaacgaatgggcctctgtgtgttctgaaggaagtggcagcagagcacgaccgcgtcaagaacaacgacaagaaggccaagaaagaggagcagtacaagaagagagaggtgggcgagaggtctatattatagttgccacgaagcgctgatcgactcatggaagtgctgggtatgttgggattcatgtacaacaggagaagaagcagatagcagcgagcggcaaggcccacctgaacgagacaggtgagtggcttatgatgcctggagtgagtggtgctgcgacgcgctggctgctgacctgtgtgaggttgcttcgttgatccaactgctgaaatagccgaggtgggtgagatcaaagccaagaaggctggcaagaaggagaagcggaaagcagcttttgggtggggcgtcttcaaccaggattcgttgtacaagggctacaagaagcggctagtgaacttgccgaccacaggggaaaccgctgccgctgttgcgtccaccggcgaagacgctcttggcgacgagttgtcttacggcaaggacgacaaggtggaagaggtgcgtggagattctgcatacatgtactgtgtttggggtttggcatgcgcgctggtgttctaacgatctttgaacaacgcaggaaaacgtggagcgcatggcgcaggagctggaggaacgcatcaaggcccgcaagaagttcagccgccggcgccagcactacgagggcgaggacgtggactacatcaacgggcagaaccgcatcttcaatcgcaaggcctcgcaggccttcgacaagtacaccgtggagatccggcagaacctcgaacgcggcaccgccctgtagtagtgtagtagccaaaacaagccacttcacgcattattgcttacatccgtcttgagcccgttgcctccctgcagaactcttttagctcgtgccatagcgagccatggtgcagtctccccggggcgcaatgaatgatgcaggccgtaagcagctcgatgggatgagcaccgggtggtccgctagctatggcccgcttgatccgtacacgcatggtgaccggttgtgtacagtctccgcagccaatcctcggccgcagacagctgcaacagcaacggctagggttggggtgcttgtgggccaccaacaccgcaaagtgggccacgaaactcatgcgtggcctgcgccgccacctcctcacctccacctcattcccggattcgccgcgaactccacgagctccaacccaagaacaccatggctccccagaccgctgccggctctgcccccaccgaaggcaccttcaccgtgaaggccggcctggccaagatgctcaagggcggtgtcatcatggacgtgaccaacgccgagcaggcccgcatcgccgaggaggccggcgccgtggccgtcatggccctcgagcgcatccccgccgacatccgcgtggacggcggcgtggcccgcatgagcgacccgcagatgatcgccgagatcaagaaggccgtgacgatccccgtcatggccaaggcccgcatcggccacttcgtggaggcccagatcctcgaggccaccgagatcgactacatcgacgagagcgaggtgctgaccatggccgacgaggagaaccacatcaacaagcacaagttcaaggtgccgttcgtgtgcggctgccgcaacctgggcgaggccctgcgccgtgtcgccgagggtgccgctatgctgcgcaccaagggcgaggccggcaccggcaacgtcgtggaggctgtgcgccacgcgcgctcggtgcaccgcgagatccgccgtctgcagtccatggacgaggacgagctgttcgtcgccgccaaggagatgcaggctccgtacgagctcgtgaagcaggtcgccaccacgggcaagctgccggtcgtcaactttgccgccggtggcgttgccacccccgctgacgctgctctcatgatgcagctcggcatggacggcgtgttcgtcggctcgggcatattcaagagcggcgacccggccaagcgtgctcgcgccatggtgcaggccgtgacccacttcaacgacgccaagatcctcaaggagatctcgaccgacctcggcgaggctatggtgggcgtgcaggacctgaaggctgcgtccgtcaacttccgtgaccgtgagggcaagctccacggcgcctggtaaatgcgccctggcacttgcactattctacagtaggcggcggtgatcctctctgcagcggaatgcgcgcaggagtgtcgtgaccaagtagcatactgcaagcgtatcgcttcgcactgtcaatatattgttattgctcaagctatgtagtatctcttgttccgggtgcgtttggaacgtcaatatgtggtcatgacgcactattatttgcacacgttggcctcgaaaggctcgccggcatgttgaattgtgcttttgatagcttggtaagtcatgagcaccgctccgatgcaaatggttgcaccaatgcacaggacaatgatggactggcgtcctgttcggcgcacgaagccaaggatcacgacttgcgagatcgcggtgacgacgaaggccagcgcacagagcaacaaggcccaatcccacgcgatcatgttgaacacggcaaacttggcagtcgctgcagccgacgagtagagcaccatgagcgccgtggtcgctgaagcaacttcggggacaatccccatctcaatcatcagaggaccagtgactattccccctccgacgccgaacagaccggcaatgagaccggcgccggcacaagctagtgggaagcgaaccaccgtctccttcgtccagtggatatcgcccgctgcaaacacgtagttgaccgacaccttgcggcagtgctgcttgaagaggtatatggctgtgcaaacgccgaagccgcagatccacgggacctccatgatcaatagcaaccaatacgcaacgccaccacacgtcacagctgctccgccgatacttgccgctacgatgcccaagtagcagagcatgatgactccttgcttggccagcgagaaatggcgttcccgttcggtgatctccgccagcacctcgtcgtccgccaccatgccggaaccatcacactcgtttgacaagctcccggatcctttgagtagggagtcgcgagcaccatcgctgcccatttcgtccgtcactttatcctccgcgcacgagctcggagaacatacagccacgtaggcagcagctcgctgttcttctgtcgattccgttgctggagtgggggcaacttcctgcaccttgcagcttttcatctcagcgcggtacatcttgatgcctttcgacactgcacggaagccgcccaacacgagcaccacgacgaaaaacagggagagcaagtagcttggcaacaacttggccaggatagtgcccaccacggcaccgcccatgaccagcggtatcatcgccaacgccaagtccgagtcgatcagtgggcgatccacggccgggtggcgtttgcggatgttgaaccaggcgttggcgacagctccaccgacgatggccaggttggacacgggtgtagcgcgcttgatgtcgaaacccatgatgaggatcatggctggaacgaggatggttccgccgcctacgccgccggccgccgagactgcgagccccactgcgatgaagacgagcgcaagcgcgtcgtacgtatcgaaggttgaaatacttcgcagctccggaaccccgccactggagcttttgtcatccgatgaggcagaagatgtcaacgagagcacggagatcaacagagcggtcaaggccaatgctgcgcatcggtatccagcgtgtctgcccatgggtagctctgcactagagttttgactctggtgcgtggagcttgaatgagaatgcccatctagacgcgaacttctcgcacgtgccagtggttttgtagggttaccttgaatagatggcggcctggacggttgtagttttccggcgttggaggctgcgatccgaaactgtcgcggagcagaggaacgttcgcttgggcgtcgaatacttgcctgcgccatcacagctgcatagaggcactctactttgatcaagactttcattatctttgctatacccaacgaaggtgaacacaactactagttgcaaatgtccgcggagaacggatcgccagcggtgtcgaccgtggatttaatggcctggtacgtcatgatcactgctccgatcaacacagccgtagcgatgcacagaacgatgatggactggcgacccgtcctgcgaacgaagcccaaaatcaccacttgcgatgcagaagtcaccacgaacgccaccgcacacagcagcagggcccagtcccaagcaatcatcttgaacactgcgaacttcgctgtagcggccgccgacgagtacaaaatcatcagcgccgttgttgatgaagccacctccggcacgatgcccagctcgatcatgatggggcccgtgatgatacctccgccgacaccgaacatgcccgcaacaataccggcaacggcacagcccaacgggaagtacaccacggtcttcttcgtccattggatgtcgccgtcgacgtactggtagttgacgaccgccttacgcaggtagattttgtgcaggtagtgcgacgtgaagaagacaaacacggcgacccatgggatctcgataagcaggatgacccagtaggcgacgccgccgcagtccacagacgcatcgccaatactggcagcgactacaccaaggtagcagatcatgatggcgatgtggggtccccaggcgaagtggcgttccttctccagaatctgtgccagtgtaccactggagcctatttcgtcgccgatcagcgctttattcacagcagcgtcggcggtggaggccgaagtactgagacgtttctcttccgagatgtcgtctttgccgactgtgacgggcgtgcttacctgcacgtagacgccggggcttgcagggacttcggctgccgccgccgcggcttccgtctctttcttcttggccatctccttcttgtgcaggcggatgcccttcatcagcgtacgcgagccaccgacagcgagcaccacgacgaacagcagcgacaggatgtagctcgggatcagcttgttgatcagcgcgcccaggacggtgccgccaattacaaccggaatcatgccgagtgccagctccgggtcgattaacggcctgtccacggtcgggtggcgcttgcgcatgttaaaccacgcgttggccacggcgccgcccaggatggccatgttggagatgggcgtcgcgcgcttgatgtcgaagctcatgatgagcaccatggcgggcaccatgatgacgccgccgcccacgccgccagcggaggagactgcgagtccgacgaccatgaatgcaatggccagggcgtcgtaggtgtccatctcggacagactcgggactccatcgtcgtcgtcgtcgctgctgctgctgctatcggcgaacgccgttgggaccagcaccgcagtgagcgctagcagaatgaagaccgagagagcggcgcgacgacaacgcgagtgggtggtccggatgcccatggtgcgatagaggaggcgaattccgaagtgaaggtgcgggacagccgtgtcgttgcgcggctgaagtatcgatcccttatgtagtgatagtctcattagatttcaattaagaggtactttgtccatctatgtaccatattagtggtactcgccctatttttgattcaattttaaatagttaacaacacctatttagtgctaacgtagtgaagaaacatcattgtacgagaaccatcactcacaccgatcgataacgtacccatctcccttcagtgtaccttgcaccatgacgtgtgctcgttgccggatcctagtggaggccgatagaggcacagggctacacgtacatgaagacaactaagtccagtactaacgaccgcgtgcgttgcagcctattcgtctgccggctccagtcggttttgtgtgggtaagaggaccagagtagtctactcaacttacggcttacaagattttctggagggtgccagggtagcagcgccagggtcggtggtggtcccgggctgtacgtgcgtagcttccacacacagatttataaatgcgcgccttgtgccctggtttgcggattggttctcgtgcccgtagttgtcggagttctactggttgaaaagcagcaacactgctttcttggtgcaccacgttctggagtctgcaacaaagcaaaaccaaacagttcatggtggcatgctctaattacttcaacttcgcaagtgacagatcacgccagtcgcacggctccctggctcaggtttggcaggcaagatatcgaaacggctccaagttggcattgcattgccaacttggcaatgctaaccgaagtaaaaggccagcactgcaggacatgcgccacgagattgagacggcaggctcggcggacatgggcccgccgaacgtgcaatgccgacacatacaaaactgttgcattctcgggaaattgttagacgatttctatagtacagtacgctcataacgctattcgtgcttgcagtttgcgacacatgtaccttgctgcaagtcttgcacctgcaccagccttgcatacatgcacatgtaggatcgtgtgccgcagaagtcgccggtacgtattcacttcttaatttgcagctcccaaggacaagacaagcagcaatggcagttcaaacgtgcctgcacgaccacgtctatctctccggtctcatagtgcttgaagcggcgctgctcccagcgacgttcgccgacagtagcaacgacgacgatggagtcccgagtctatccgaaatggacacctacgacgcgctgtccatcgcgttcatgatcatcggactcgcagtctcctccgccggcggtaggttatcctcgtgcccgccatggtcctcatcatgggcttcgacatcaagcgagcaacgcccatttccaacgtcgccatcctcggcggcgctgtgaccaatacctggtttaacatgctcaagcgcgacagcgacagcggaccgaccattaatcgacccagagctggcgctcggattgatccccgtggtaatcggcggcaccgtccttggtgcagtgatcaacaagctgatcccgagctacatcgtgtcgctccttttcgtcgtggtgctcacttttagcgacgcccgcatgacgctacgaggcatccggctgttcaagcaggaggttgcccaaaagagggccgaaagctctgcaaacgagaccaaggcggacgacccggagagcccaagtgtttacatcaaggctagcacgccacaaccatccagtgacgacattatggcggaagaacatcgtctcagcatctcaagatcctccctcaagtcggtgctggatgaagatgaagacggtgctatccgatcgcagattctggggaaggaacgccacttcgcctggggctcccatagcgccaccttggtctgcttccttggcgtcgtggccaccagtatcggcgatgcttctgtggactgcggcggcgtcgtctactggatcctcctgctgattgaggtcccatgggtcgttgcctttgttttcttcacgtcgcactacctgcacaaaatctacctgcgtaaagaggccgtcagctaccagtacgtcgacggcgacatccaatggacgaagaagaccgtggtgtacttcccgttgggctgtgccgttgccggtattgttgcgggcatgttcggtgtcggcggaggtatcatcacgggccccatcatgatcgagctgggcatcgtgccggaggtggcttcatcaacaacggcgctgatgattttgtactcgtcggcggccgctacagcgaagttcgcagtgttcaagatgattgcttgggactgggccctgctgctgtgtgcggtggcgttcgtggtgacttctgcatcgcaagtgatgattttgggcttcgttcgtcgaacggggcgtcagtcaatcattatcctctgtatcagcgcatcggtaacactcggcaccattctcatgacctacgaagctgtcaaggacacgattaacgacgctgggaaccacttcactgctgatatttgtagctaggtggttgagactggagcgttgagcactggagaaatttattcatgttcacacaactaaccacctttgctggcagtccaacaaatcttcactttttagtggttgctcatcggaatggaaccatacttctggtgctccattcggcgtttgacggcatgacgaatcaaaagcgcgatgaagcagaggatcagcgcaccgaagagggaccacagtagcgtctcgaacacagcaacggcatgcggctgttggttcgacgtatcggcggctgcaacatcgaaagcacgggctagatcactcgcagttgaggccgtcagggtcgaattgtacgttgtgccctgatcatgggtcagtgaatcaacgaatggacgcagcgtatccgcgacacacacgtgcttgagtgtttttccgattagcttcttgaacgtcgagaacggacatcggacatctgagaccccatcaccaactttgacctcccctgagcatgacggaatgatcacttggacgcggtctggaggctgttcatgcaatcatacgtgtcagacatgttgtcactcgtggaaaaatagataataccgatctcacgttctcaggagagagttggtctccattgcgaatctgttcgggagaagccgcgacaaagtacagcttcacgtagaagcggctttcgtcgttgtcaccaacgttgccactttcgtctgcacgccacgaaatacgcgcattactcgcgtctgcagaatttaagatccgagattccgacgtgtttgctgtggtctggccgttcggcgtgggagtggcgtgcaactcaaacacgagcatgcttccaggcactggctgatgagggtgccatcccttcgtataccactgcagcctatgcatacatgtaatgcgttagcacatacatacatcgcagctacgcctttgcatgacgtaatggcacactgtagtcacaactgacgtaccttaggagattgcgaacatacaacaagttgatgtcatgggctgcgtagtaaagtagccgattgtcaggtccttgtcgaagatggggcccctcgccttttgcaacaggcagaggcctttgcaagatattttgttcaaagctggccgtcagatgagcgagcagagtggcgccaaaacttgccgagttgacctcgttcgtgatgagatccatgtgcgtctgcaacaacgacaacaatgggtcagtacaaccagagcgaacggctagaccaacaacatgggccaaacctcgtggatcttcgccaaagataagatcttttcaaatgtcagctcggcaggtaggctcatgttgttgagactctgcaggagcaaccactctgagaaatagtcggcgttggaaagagtgtctttccagggcaagtaaaatgccccattccacgtcgtggggatgtcaaacaggtcacacgttgcggagctctcggacgcgttgtcagacttgtctttggcgtcgcagactgaaggcgcgcaacactgcaacagctcgtcgacttctgccacctcgtcacggatctcttgaagcacgaatctcgtgtcgttacttcccgttattccttcatacactatcaagagcaaacgaatcagtttttcctcaacatagcacgatgtcgttcggcagcaatacgtaccggccctcgaacacacagggcagttggtggtaggatcctgaccctgctcgaacaatagctcggtctccttggtgctcggcacaagctccttgcaaagcgggtaaagtccactcaagaacgcgatcgctgtcagctgcacgcatcgagccggatttagatcgcgaactcccccagatacgccacctgcagcgaccacttacattgtctcgctgattattgtcagcatatgcaaaggtttccttgcacgtggcgttcaaaaattcctggtagaggtgctctcgaaagtactgctcgaacgaaattccgcagaggaaggagttaggtcagtgtccacatgacggaccagatcgccgcatttcgctcgtaatcacttgcctcccccatgcgctccacgacgcggaaaccgtgcttggtgagcttgggcgacacgatctccgccggatcttcggtctcggaggtgccccaggcgttggcgctcagcggcagctcgagattcgggttgcgcacgtactgcttgagcagctcctccgacggagactccgtccccagtccataggggccgcgcacgccgtggcgagagagcacaatgacctgtggagagggaggagacgagagagagagaggagatgaggtcgaggacgatggacgcacgcaatgcgttcgctctgaggaagcagaggggtgacgcggaatgcggctgacctacctgacgcaggcccgatgaaggagacgcgaccgctgcagatgccggtgctaatagagcgccgagcacgcagatcaccgccgctcgagtcagcatggcagctctcagcattctcagaccttttggctcaccgccgatgtgcgatagattaatatcgtgtgaaccacaccatataaatctaccacattgaatgtccacattgaatgtggacattcagtgtcctcctgctggacaatgcctgagatcgggtgccaaagtcggcactgccaactggccacgcatagccatcccttggcccacgcaggcccgacaaactgcggctgagacgacagctgcgcgcacaacacccacacgtgctggtttcattgtggagtggcctaataccattttggctgccaacgctacttgcttacttcgacgcacatatctgcccgcaggtaatgcggccgcagtgtacatggcttcgagttgagcctggccacctggtgatttttttaagttagcacaatattatcacccctatggggcgagcgggccaacgtggcgcggctcatgtcggagctttgctcacggcggcaatttttgcctcgcggtttcggggggccgaggttgcccgttagtgctttgagattgttgggactgtccacgcggcgggctcgcaaacacgcccagaagatgaccaagccggtctcacatcgcgtgcggtgcgatggtgcgctgggtgggcccgccgtcgttagccacagcatgctgcgaccgtccgatccttgactcgcccgtccacagagcgagtcgcacctcaagagcggcgccgccacctatgttccgctcacgcgagagccccatgtgtggccgcagctcgcaccaagtcgccgcagcgggatcagctccgcggtgcagctgttctcgctgcgctctgcggctgcggcgtgccggcgtcgagccatcagaccgtggcatggcatggcagctcttctctggtcggcttccgccacgatcgcgcccatgcaagcagccacctggccgcaccacctgcgctccgcttgacacagtcagcagggcgctgtgtgtgggtgcaattagcggacctcgttgctgcggctgcggctttccgaaaacatgctggccccggccagcttgtgctgcggaacttccggcccacaatcggtcggtctctggctgtggccagcctgccattccaagtcgcgcgtcgcgcccacacaacttgcccgaacctcagcgccgccacttggctcggggcgcccgccggctgagcagtagcaccgccgccatagagtcgctgaaacgaaaggcacggttgcgagtctctgccgattgcactttgtatttgacgttgtgcgtgccacacacagcggctcactgtcctatactccgccaccgcagctactacagaccgacagacccaatgacgtcctgcgtggtgcaagtccaggagctgtcccgccgcctgctcaagcgcgtgcggccgtcgctgcccgccagcgccggcgtcgaggacctgggcgccgccgcccgcgaatcggccaccagcgaggcgctgctcaaggtctgcaagcgccagatcgagtcgtccccccgcgcgtccatggcggccgtcgaccaggaggagatcgtcgcggccgcgcccgttatcgaggccgccatcgacacgaccgccactacgcattggcccagtgtcaccggctgcgagaacgtgcgcaaggcgctcacgttcctgcagacctcgcgccagcacgcgctcatgctcatgctgcagaaccactgggagcgcgccatgagcgtgctcgagaagatcgagaaggccactgagagcgtcagcgagaagcggcgacaggtcgtcatccagcaggccaacgccggccgcaacgtgctcgtggagaagatccaggagctcgagctcgccgccccgcgccgcgccgtgcgcttcaacgacgacgtggccgtcgccttcgccgaggacatggaccgcaagggcgacgacgtgtccgagcccgtgcgcgaggagatgctcgtgctgcgcgcctcgcgcaagatcccgcaggagaacctctcggagttctggaacgagtgagctccatttcagcggcggggccgatcgcaaggcccccttcactcctaacttatttggcatagacttatttaatacgatacgaatgcttgtttccaaccaacactacgccatgattctgaatatgctttcagtaccggtgcatacttcgaagcacttcatcgacctcccccactttcgtgtaacttacgctccatcagtcgagcatggactccatgcttgactttcagggcggaacgaaatccccggatgggacgcggtacaaaagcttggatcggccccggcgcactcatccgccggcccgacgacgacctgcacacgaacggcaacaacggcaacaacggcaacggcttgaagcactcccggtgtacaaaaggcgagctcaaatcgcgtgagtgcctaaatccacgctgccgtcgtccgagcgcgctccgaacccccctgagggcagcctcgagcgtcgaaatgcggatacggcacggtactcgaccgcgccgccctttgggccccgttctgacacgtacgaggccttgccgtaaatagtcggcgctaaatgcttcacagtcgatagtcgatacagtcgatagtcgggtaggcgaacggaactaggaatcgtaactagcggaacagcatacaaaacccaagataaaaaagtttcccctcgcgctgtgggtatcattcagacggcccctccttttccaagacgaagacgagcagcgcgagatggcggacgcgacgctgtaccgcgccgccgggcacccggagaaggcgcggctggtcttcaacgcgcagctgcaccagcagctcaagaacatcgccaagaaccgcgagatctcggccgtgccgggggcccccaccatctccagcaacggcagcatgcgccccacgcagcccatggtgctcaacggcgccggtcgctccacggagctcaacggctggagcctggagaagaagatgctggcgctggccgaggcgctggatctgctgcgccgccccttcttcttctacctggactttggcacggccgcggcggccgaagcgtccaacggaggcagcgccggagcctccggggaccgcaaactcacctaccactcgtactttaacaagatgctgccgctacacgtgggccagacggtgttgcttgacctgtggtacgtggaattgaggggggaatgacgagttttgagcgtgagttttgacggattttttgccatgatagggactacttgatggatatggtcgaccacgtgcctgtgcgcaatcgctgccgggcgctgtacatgcaggcggcagtgtatatctgtcgccgagtggagttcatcgagggatacccgctggacggacagcaggtgcatctggactcgctcgtgtcgaagcggtacatccgcttgctggaacgcagcgtgcgcttctgctcggtcaagatccgcaaggtgcgcttcatggcggaagagcacagattcttcgtagctcacgtctacacggcggtgtacttccgcttccctttcgccacgcccaagctgctggaagctgtgctgcagtgcacggaaaaactcgagggcgagacgaacggtcttcaaagtgcaactaacggcttcagcaatggttcaaatgggaatctgaagaatggagcaggtgctcgtccccccaaggcaaagcgtcggcatcgtggaagcatctctggaagcttgcgcagtcctcgacagtatcgccgccactggaacgatctctcaggtaatgaatgattttgacgaaaccctgtaatgtgttgtgtacggataactgactcccgagtgttattgtagaatcgaagtgccgaccagatcgcatcagtggagtcgacctgcagctcgagatcttctcgtctttctcggagtacaagtcaaatcgcggaacagatcgactggtggtgcctgtgaagggtggcagcacaccgggtattccactcgatatgctgagaaggggctccagcaataaatccatcgcggcggccctcgaagctgtattccaagaaggaatgaaccgggtgggcgaggagcaagaggtcactttcatttaccagctccctctgctttacattggacacaagctgcaaaatgatgcgttcgtgaagctagctgtgacaactcaagacaagatcgaagccggcttggacctgttcgttgatcgggtccgatcgccaggaagagatgacctcacggctgtgacctttgtggctgctgtgctaagtgacgtgagcagttggtgcaatcatcgttacgcagacggtcgcattttatggcattgcgtgcccggttactttgctctcgtgcgtctgtacgtggcagttttcgagcgcatgtgtcagcgtcgggcgcgctctagtggaggttcgtcggctttgccctccgttaaccggattctctccataatcgaaggcaagatcagcgatccgtgggaagactactggaatgatcgcgagattgacaccgtgttggacgcggcaagcgaggtgctgaagaacgaggcactagtgaatgtgctgatgaaggtcattctggagagcaccaacatcctcgatcctacaagtgtcaactattcttttggaattttgcaacgcatgcttgagatcgcctcgatggctgcgatgcctgctgcaacggaggctggggctaccgccgggaagtttggaggtcgcgtgcgccactgcttgggagcggtttttgatggggattatttcctgagcagcatgcgcagtgctcttcagtcttcgcacgtccaaacgctgctgaaagtcctcacttgcatctacaactgtatcggtacgtgcataatggctatggatgtgctggtaagtcccctagactaatgttgacctctcgccatttctgcagatttactgcctaccactgctcgtaagcggcttgtggcggagctcattttgcgcgagaactttttccatttctttttgcattggaacgaagaggtgagatggctttgcttaggtttatgtgaaaatatgcgcacaattaacttaccttcggttttctatttacgctgcgtagattcggaagatcttctgctacatgattgtgttcaagacttcggcttctaatcgattagacttgccgagtgcctccgaccgaattctgcttgcccagaccccgtttttcgaagtgggcccagcttcaagatccaatgggtcgactttgtcggctgcgtcgcctgcgctaagttacttgagtcacctcagcgagctggcgcaggctatgttacgccccactgctgacagcgagatggaccaggcgaagaaagcagccgttgggaggaaggcacttcagcgtcttactaactgggatgccagcgcgcgcttgagacgtacccgcagcggtggtgatgctgtgttccgggacagtctcgtcgacgaagaactatctgtggatctttccattgcaagcaagctggatgcgaatttcaagatgattgcggaccaaatgaaccctggcaaataccggcagaatagctcggaagacggagaaccctctgcgagacgctacttccctcgagaactggaggcctatgctgagcgcgcgctttcacagtacgttttggtgctttgggagtactacgaggcggctttcgagaaccctgcgaagatgccgattgcgccgtcgctcgagtttacgatttcagtgccattcttctccgattaatccgacatgtgagtgtattactagtatgtagacgtacgctagattactcgctgactgagaagcaagtgcgcggggaacagctaaacttgagcgtagaggcttagctggcggaacatttccttgctgctgtataccgtggtggtagcccccgctgaaaagacaaatagaagcaaacatcagtcacacttgtatccgttgtaagtgtgggtgggatgtcctcaccgtgcagcggttcaatcgtgaacatccgcaagtctcctgcccgtacacgtttccagtcgcgttttcggcgtgcaaaaaggttatcatgggtcttcttgtctgccgtgcggcctacgagaacagcatcatagatcagtggcaaagcaattgacaaagataaacaaatggtgacatcatctcactcggatgatcttgcttgcgcttgtgtgtggtccggcacgagtttttctacaagcaaaagcaaagtacacatgagcgaaacgccactcattagcagagaagaaaaaccgcgtcagggtatcataccgcggcgttaatctgcaggagtctctgacgttcctcacgatccagcgtgtgctccacgaacgctttcagccaccactacatcagcgcatcatcagcgttagagtaaaacacaatagcagctacagtagcgtttgatccagtacccacccttgcatccatgttgcgcagcgagtgtttcttggtgcgcacgtaggtctcgaggaacgagtcgtcgcgcagctgctcgcggtgtccgttcttgatgcagttgagcacgaactcgcgcagcggctggtacgcgcccttctccaggtcggggcactcgtgcagctccatgaactcgaacacctgggtcttgagcacgagcggcgccaggtcgtcggccagtcctccctccaccgtcacgcacaccgtgtggacgcccgcgttctccaatctgatgtcctgcacgtagtagacgccgttggggaaggcggtgcccaccctctcgttgaacaccaccttgtcctcgttctggatggtcacgcgcagcgccgccactgcacgggacttgacgacggtcgacttgccattcttggtgcaggccacgtagaagcccaagtagctggatagcggcagaggatcgacaatgcaagcaagtcaacgttagatgagtgtgattgatacactggcagcatgaggctgcagacgcaccggaagagcgagaactgcagcggcacgcgctcgggcagcagctccgcccacttgtccgcgatggggaagagctggcagccgtccggcagcgacgggttgcgcttgatggtgatcggcttgaggttcttgagcgacatgggacccgcttcgagccaagactttgaaaactacctaatttcgcgcgcgggagacaaagacccattttggaaaatgggtgaattttatattatctgtaccgattcaaaatacatctggaacttccacttccagtctggagccatcagattgactacagcatcaatatgatgccgccagagatgcaagctcgatgcgcgcagctccacgcggagctgacgcggcacgcgctggcgtggccgttcctggagcccgtggacccggtggcgctgaacgtgccgacgtacttcgacgtgatcacgcaccccatggacctgggcaccatgggcgccaagctcgcggcggacgagtacgcggacccgagcgagtaccgcgccgacctgctgctcctgttcgccaacgccatcgagttcaaccgcgacgacgagcggcccgactcggtggccaacatggcgcgccagttccagcgcgtggcgctgcgcgactgggaccgcgccttctccgaggcggccacgaccgactgggcccagcgcgccgagcagcaggcgcagcagcgcttcgtgcagcgcgccaaggacgccaggctgcgccagcgctggaagagggactcgttcgtggccagactcaaccgcgacaagctggacgagcgcagacgcctcgtcgccaacgaggagtaagtaggccgattgatacctaccaaccaaccaaccatagctgcagtagaatatccttaacgtgtgtttgtttcccctctctgtgttgcatgtactattatttgctgcgtgtatgctgagaggctcttcggtggtctgtcggttatttttttgttgctgtttggttgagcaggcaggcagtggaagagcttgggctggttggcgactccttgagctatggagcggagacaggggaaggccgcgcggacgcggccgccgcagctggcggggaactcgatctatgacttgacgctggacgcgacgttcgagttcgatggtggctctggcttcggcagcacgttgccgtccaacaagccgctgcaggcggtagcgggagcgagggcggcgatgaagtcacctatggcggttgcggatcatgtagcggcggacggacacaagttcacgttcacgacagcggaggagtacacgtcgcccaagaagatcccggtgtttccaggcacgctgcgcagccccgagaagaagatcaagccgcaccgagcgaagcctccagcgggacagtcaccaaagcatttgcagacggcttcaccagcggcgaaagcgggcgacgcggttccagcgccgagtggaatttcgtgggaaggcgacgtgggacggccgaagcgagaggcgtcacctcgacgtttcctacgagccacgctcgctcggtcatttggcgatggagagggtgaggacgaggaggagaaggctgcggccaaccagcgagatcgacgaccttcgctgtttattggtcaccacgatcctgcaactggaacttccagtgtggttgtggccgacgcggccgctgaagctgcggcagcatcggcaacagcgttcctgaaaactggtgaggacgctatcgctttcttcgcgcgtaacggatcggacagcgagatcaagtttgtgcacctgaaccgtgccgagactgggctagctttccgaccgtatgacctcatggtagttgcgcaggacgacgtcacgccgaacgagcacttcaccatgtcatctagtggcctcgttcacgtttcagccggcagcccatcagagttcatcgcccttgccgagtggatgcgtcagtcgacgatgttcaacgttctgacgtcgctgcggtttttcaagcactatctcgtgaacaaggccttctcgctgtggtgcgccaacgtgcgtttcaagctttactgccgccagcgcaagcgattaagtgcgaagctgttcctggccaaggaaagcttttgtgttcctctgcttcaggtgaagaaggttatgagcacggagctcatgggcgtcgtcctactggatttacgggcgcaaaagacatacgagagctcggcgtttgtggagtatcaggggaccaagcgcgccgaaggttccaagcagtttgaaatatgcatcgagaagctgcagtccatcattcaacgcgtttgctcggacgtgaaaaacctgaccaagacatcgaacccgcaagaggatttcctttcggacatgacgcttagctccatggggacaagccaggagaagaccaagtcgattgtggctgttaaggcagagcaacagcagcgacgcagactatttcgccgagccgcagaggaggctggtatgattgcagactttatccgactcatcgactgtattgctgtggagagtctggtgattttggctgtgcagagctgcgcaaacttcttgtgcgagctcaacaaggtcccgcgcaagacaggactgtttgagacgactatattttttggagagcagtccacgatattttccccaacaagcgagcagattcagcatatcgtcatagcaatgacggacgatatcgtgagcacggtcaactcggtatcgcgagttctatacctccgcccatttgcagcgtatgtgggcaacgcggtggctgatgcaccccatgtaggctcgacgatcactagcagtgtcgcttttggacaaattcgcaaggaacttgtcgccaagattgcaagtgactatgcagaggccaccgagtacgtcaagattttcgacaacgtgcgtcctatttacgagtacgacaaggtctgggatctcgaggagtattcgcagcgtgcgcacaccgtgactacgctgaaagcggacatgctgcagatcagcacgtgggagaaggagctcgagaaaatgcgagcagggcagacgattggtattcttcacgtggaaagtcgcaagctaaagcagacattgatcccgatgaccacggctaagctggacgcgatgaagggtttagtcaaagatttagcgcgtgcaaggtgcaagacccagctgggtgagtacaaacagcgtatccagtcgctgttgcagcgtcctcaacacctgaaggaattcgcgggccatgtggaacgggtgcagaatctaaagtccaagcagaaagcactcgcgaagaacacaaatgtggtagacgagctgtaccgacttctaggtacttacggtgtgcgcatctcgtcagaagatatggtgcagctagacgacttacgcagcgtccaggagagctacaaggaagaaacagaagccgttgatgcctttgttgcaagtcggttaggtgagatgacgcagcagttagacgccaacattcagcgcttggacgaacaagtcctccagctacacaaccagttgcaaggaggtctcttcatcgacgctacccacttcgaggatccgtcggttgtgaagagcgagttggagagtgtgaagcagcggctgacgcagctggatgaactctccaagcagtacacagagtaccagacattgttcaacctgaccccattcaagtatttgaacctgcaggcgacacaagagtacttcgggactgtggactcactttggacggcggttgaaaagtggaatgagctgtacttgggtgctatgacaagccccttcgtggaagttaacgctgaggagctctcaaaggatgttgccgtagctttcaaggacgcatatgcattgcacaagaagctgagtaatgatgtgactgccgtgctcaaggatcgtaccgctgagttcaagttgaagatgcccaccattctggagttgggcaacccagccatgaaagaccgtcactgggagaagatcttcaaggcattacggcagccctggtaccctggtattctctttacgctggagaacctcgtggcgtacgacgtactagatatgaaagatttggttggagaaatgtcggctgcagcctcgggagaggcccagatcgaggcatcactgctaaaaattaagcacggttgggaccaaatggaattcacatgcgtgagccaccgcgaccaaaatgacgtgtttatcctaggtagcctggaagatatcttgatgctgctggaagataaccaggttggtctgcagacgatgatggggtctcgatttattatgggcgtgaaggacgaggtagagcgatggagtaagcggttgtccttactctctgatactctggacgagtggatcgcatgccagcgcagttggatgtacttggagacgattttctgtgccgaagacattcagaagcagctcccggtagaagcgcagaaatttgctttggttgacaagaactggaagtcgactatgctgcgaacgaagaccgacccgagtgtcattagatcagtggagggaggtcctgagctgttagaccaattccgaatgtcgaacaaactgcttgaagagatccagaaatccctcgaggactacctcgaaacgaagcgaatggcgttcccacggttttatttcctttctaacgatgagttgctggagatcctatcgcaaacgcgcgacccacgcgcggttcaaccccatttgggtaagtgtttcgacgctatgaagagtgttcgcttcgatgattcccctggagcagcgagcaacgtggtgaacgcaatggtcagtggcgagggtgagctggtcatattcccgaaccacgtgatagcaaaggggccagtagagtcttggctgactgaggtggagaaagcgatgcgtgcaagtctgtatgaagacggtgtgaaggctctcatgaattatccgattgaggacgctattgaccgaaaagagtggctattcggatacgcagcgcaggttatcatcctcgtagatcaggtcttctggacgcgaaatgttacggaggctattgcgcaagtggagagcggaagtgacccacagactgtcggtggcttcctacagtttagtttgaagcagatcgatggtatggtgcaactggttcgggggtctttgaccaagctgcagcgtattctgatgggtgccattatcacaattgacgtccacgcacgagatgtggtgcgttcgctcgctgacagcaacatttcgtcactcagcgactttgaatggactcgacagctgcggtattactgggaggaggatgtgaaaaacttcgttgcgcgccagaccaacactcgctttatatatggctacgagtatcttggcaattcgccaagacttgtgatcacaccgctgactgatatttgctacatgacgctcacaggcgcactgcatctacgtctaggaggtgcgcctgctggcccagctggaacaggcaagaccgagaccacgaaagatctggcgaaggcactggcagtgcagtgtgtcgtgttcaattgctccgatggattggactacaagattatggggcggttcttctcgggtctagcacaggctggagcatgggcgtgctttgacgagttcaatcgtatcgatatcgaggttctatccgtgattgcacagcaagtgctatgcatccagcaagctattgtcgccgacgtggacgagtttgagtttgagggcaatctcatcaggctgaacacgggctttggcgtctttattacgatgaatcctggctacgcaggacggacagagctaccggacaatttaaaggcactgttccgccctgttgccatgatggtgccggattaccgactgattgccgagattgtgctgttctccgaaggttttgccaatgcgttgccgctctcacacaaaatgacacagctttattcactatcaagtgagcaattgtcgaagcaggatcactacgatttcggtatgcgtgctgtgaagtctgtcctggttgctgctggtcagctcaagcggaaggagccagagatgcacgaggatcttcttctcattcgagcaatgcgcgatagtaacgtccccaaattcctcgagcaagatctcccgctgtttcgaggaattattgccgatctctttccaggtgtcgtggtgcctttcgtggactacggtttgcttcagaaggccattgaacagcagttggacacactgcacttgcagcaagtgccatcgtttatcaccaaggctattcaagtgcacgagacgcagctggttcgccacggaatgatgctcgttggcgaagctgggagcgggaaaagtaccaattgttacgtgctagctcgcgcactgactcagctctatcaagatggagttgttgaccgcgatggcttctacaaggaagttcagcgccttatactcaacccgaagtcgatctcggcaggacagctctacggcgagttcaatctccttaccaacgaatggacggatggtctcgtaccgaaactggttcggcaatgtgtacaggaagccgcagagtctgataaccgtaactgggtgatatttgacggcccagtcgatgccgtctggattgagaacatgaatactgtgctggatgacaacaagaccctgtgtttgtcgaatagtgagcgaattaaactgccgcatacactgcacatgatgttcgaagtgcaagacctccgtgtggcttctccagctacggtcagtcgatgtggaatggtgtacatggagcaagttcatgttggaatgacgtcgctggcgcggacttggaaagttacgacgctggagccaatcttaccgacgttcccggagctctgtgatatgctgcttctattaatcgagacccacgtccctgttgcgatcgcatttgttcgtgagaattgccgcgagaaggttccaagcaacaaccacaacttgatgcagagctgcctgaatctccttgcctcctgtttggccagtggtgtggtacagaacgcaggtgccaacaacctagcgggattggtgcgcatgtactttgtattcgctgttacatggtcagtgggggccaacattgatgatgcgtcacgcccaaaattcaacgatttctgtatgggccagttccgctcgcttatcgatagcagtcatgacggtgcgccggtgacgaacgtgtacgaggtggtggttgatgatgcaacgggccagtgggtgtcgtggattgataagacgccaacttttaccttcgtccctggagcgtcgtatttcacgatggttgtgcccacgcaagacactactcgcttccgatatcttcttgaaaagctcatgctcgctgaccatcacgtgctctacagcggtgagactggtgtcggcaagtcggttattgtgcagtcattcttggacgacatggccaagacggatagctgtattgcatctaccatgagctactcagctcaaaccaaacctcgcaatctgaacgaaatgttcgagctcaagttggacaaaaaacgcaagaacctgttaggcccaccggtgggcaagcgtatgttgttctttgtggacgatcttaacatgccagcactcgaaatttacggggctcaacctccgaatgagctgctgcggcaggtcatcgaccagggcggattctatgacacctccaagatgttcttcaaaaacgtcaaggacgtggtgtttgctgctgcgtgtgctccacccggaggtggccggagcgaagtgactccacgtctaatccgtcactttcacatggtctggatccccaacctgtcgggtgaagtgatgcagcggatcttttcgtcgatccttggtgggtttctcggtgcggaattgccagcgatggcgcacatggctgcacctattgtgagcgcatccgtgcaattgtatcaacgtgttgaacttgaaatgctgcctacaccgtccaagtcgcattatacattcaaccttcgagatctgtccaaggttttccagggtgtactcatggtaaagaaggagaatgtcccgaacgaagacggcctgctaactctgtggctgcatgaagaagctcgagttttccgagatcggttggtggacgctgatgaccgcgcgtggttcaacggagcgtgttcacagctgatcgaagagaagatcaaagtgtcgtggcccccctcacgtttcgagaacattttgtacggtgactatctgactcgtgagaatcgcacctatcgacctgtgcaggatctcggacaactcaattcgctgctctcagagtacctcgaagagtacaatatcacgttcccgagccagatgcacttggtcttcttcaacgacgctatgcaccacatctctcgaatctgtcgcgttctacgacagccacgtggtaatgcactactcgtcggtgttggtggctcgggccgtcagagtctcacacgccttgcgtctttcatggccgactacaagtgcttctcgattgaaatcacacgtgggtacggcgcaaacgagttccatgaagacctcaagaagattctaatgaccgcgggggcccagaaccagcctgtggtgtttctcttctcagacgcacaaatcgtccacgaatcctttcttgaagacatcaacaacattctcaacaccggtgaagtgccgaatttgtatgcgagtgacgaagtggagaagatcgtaggtcttgttcgtccgttggcgcaacaggtcggcaaggctacgcgtgaggacatactgcagtactacgtcacgctggtacgcgataatttgcacgttgtgctcgcgttttctcctatcggtgctggttttcgcaaccggtgccgcatgttcccttcgctcgtaaattgctgtacaattgactggttcaatgcgtggcccgaagacgcactaaactctgtcgccaatcggttcttcgctacgaatgccgaggagcttggaattgaagcgcacgtcgacacattgtgtaaaatggcggtgacaattcaccggagcgttgaggaagctacccttcggttctacgcccagctcaagcggcgtaactacactacaccgacgagctacttggagctgatcaggttgtatgtggatatgctgcgaacacatcgccagcttgttcgtgcaaaagaagcacgatatcgaggtggtttgcagaaactgacagagactgaagaggtcgtcggcaacttgaagagctcgcttacagagctacagccggtgctggtaaaggctcaaaaagacacctcactactgctggagcaagtggcgaaggaccaggcagaagctgacaagcagcagcaactgattcaagctgatgtggaggctgccaacaaaatcgccgacgaagtgaaggtgatcaaggacgactgtcagaaggatctggatgaggctatgcccgcgtactacgcctcgatcaaggcactgtcgcagctgaagaaggatgatatcacggtgctcaagacattcacgaacccgccgcggctggtgggtgtgacgatgaacgcggtgtgtcttctcttcggtgcaaagcaagaatggaacgaggccaagaagctgctcaacgatatgaagttcctggacaaactcaaggagttcgacaaggacaacatcccaccgaagacgattcgtcagcttcagaagttcatctctgacgaagagttcacgcctgagacgctcagtagtatctccactgctgctacttcgctttgtatgtgggtgagagcgatgtacacgtacgataccgttgccaagaacattgctccgaagaaggagaacctcaagcgagcagagcagcgactcgaagaggagcagaagcagctcgacatcaaacaaagtggactgaacgctgtgctcaagaaagtggcggacttgaagcgcactctggaggaagcacaacagaagaagattgacctggagaagcagtcgcaaaagacgcaagcgcaacttgtacgcgcagaacgtctgattgattctcttggcgaggaacaaggtcgctggaaagagtgcgcggagaacttggcgaaagacatgatcaatctggtcggcgatatgatcctgtccgcaggttgtattgcgtaccttgggccattcacatctgaatatcgacacgagctgcaagcgaaatgggtcagcttctgcaaggcaagcaacttacctgtggatgatcatttctccttccaacgagtactggcggaccctgttgttgttcgtgagtggaatataatgggtttgcccgctgacacgttttccattgagaatggtttgttcacgacgatgggacgtcgatggccgctcatgatcgacccgcaaggacaagccaacaagtggatcaagaacatgtacaaagcggcaggctcgctgcagattatcaagttgtcacaaaaagacttcctccgtacgttggagaatgctatccggtacggttcgcctgtgatgcttgagaacgtggaggaggacttggatccttctctggagcctgtactgttgaagcaagtgttcaagcgcggcggtcagaacctgcttcacctcggtgacagtgacgttccgtatagcggcaacttccgcttctacattaccaccaaattggcaaacccgcactacatgccagaaatttgcatcaaggtaacgatcatcaacttcacggtcacgcttacgggccttgaggaccaattgctggtggatgtcgtgcgaagcgagcgccctgacctcgagcagaagaagaacgagctcactgtgaacatcgcggcagacaagaaacagctcaaggagatcgaggacaagattttgtacatgctggagaactccaagggaaatattctggacgacgaagagctcatcgatactctggctcacagtaaggtcacctcgtctgcgatcaagactcgtatggctgaagccgagacgacgtccatggaaattgaccaaactcgtgaagggtaccgctgcgtagctgtgcgcggttccattatctactttgccatcgcgaaccttgccctcgtggatcccatgtaccagtactcgctgcagttctaccagaagctcttcgtcatgcgcttgcaaaactcaaacaagtcggaagtgctggaggagcgtctggagatcctgatgcaggatatcaccatgtcgatgttcgtgaatgtctgtcgagggctgttcgagaaggacaagatcatttacgccttcatgatcgcatcaagtatcttgctgcatcgcggtgcgatttcctcgagcgagtggaacttctacttggtcggcgataagaggagctcagccatacaggcagcacaagcggagtcctgtggtctgacacgtccatcttggctttctgatcgagtttggaagactgttattggcatgaaagatatctcgtcagtgtttgccgacctcccttcgtctgtggggcagcacgcgacggagtggaaacaagcaatggtgctggctgacttaccgcacgcagagaaactaccggagccgtgggagtcgaagctgaccaacttccaaaagctgctggtgctacgtgtcttccgagaggaaatgctcgtcttcggcacgcgcgagttcgtcgggcgtgagcttggcaagttcttcacggagtcgcccccgtttgacttgggtggatgctaccgagactcaaagcccgagacacctctgatcttcgtactgtcgcccggtgccgatatcaatgactacctcttggagctcgcgaaacaagagggtaaggatggcgctggtctcaagatcatctcgcttggtcaaggtcaaggtccgattgcggaagctctgatgaagcaagccaagcaaacgggagactgggtctgcctccagaactgtcacttggctgtgtcatggcttggtcgactggagcagatcttggagcagtcagcgacagaggagatgcacgtggagttccggttgtggctcacgagtatgccaagcccgcgcttccctgtgccgattctgcagaacggcatcaagatcacaaacgagcctccgaagggaatcaaggccaatcttggacgtacgttccttgacatgaaagaggccgactacgaaggctgtacgaagccacgcgagttcaagaagctgttgtttgcattggctttctacaacgcagtgtgtctggaacgccgcaagttcggtgctgttgggtggaacatcccgtacgagtggatgaatagtgacctgaagacaggtatgcaacaggttcgcctgtatctggaggagcaggaagaagtgccctacctgacgttgaatgtcatggtagctgacatctcgtacggcggtcgtatcaccgaccgatgggataaacgcaccaattcgagtatcatgcgcaagctgttctgcaaaggagtcatggacgactcgtaccggttcactgcctcgggactttactatgcgccagcggaaggttccttagccaacgttcgcgagtacgtgagcttattgccaactgcagatgcccccgatattttcggtcttcacgcgaacgcagacatcaccttccagcaaaaagagactggccagttgctgggcacaactctgaggatgctgggtggaggtggcgatagcggtggcgggggtgctgcccaaagcaacgacagtatcgtgatggagatggtcgtagccatccaggagcgaatgccggacttattcatggagagcaaagcacatccttcgacattccaggaggcagcgggtggcagtcgaaactcgctgggcgtgttcctgtcgcaggaaatgatccgcttcaacgtgttgatccaagtgatgaagacgacgctggagatgctgaagcgcgcgatcaaggggcttgtggtcatgtcgggtcctctcgagaagatgtacaacggcttcttgatccagcaaattccgagcgaatgggagaacgccggctatccctgtttgaagcctttagcctcgtggattgaagacttctttatgcgaatcaacctcacgaacgagtggctcgtaaatggcccgccactcgcgttctggttgtcaggcttcttcttccctcaaggcttcatgacagcggtgaagcagtccttctcacgtgataagcggatcgccatcgacgcgctcgtcgtatcctgcgaaatcatggcgcacgacaaagagcagtacaaagcacccccgcccttcggcgtgtacatctttgggctcttcatggagggcgcgcggtacgaccgcaacacacggatgatggccgagtccatacctaacgagctcttcgaccggatgcctgtcatttggctcaaacccatgcggcgggaggagtacaagcccactgacgtgtacgagtgtccactctacaaaacgtccatccgcgccggcacgctgtccaccacgggtcactcgaccaacttcgtcgtggctctggacgtgcccaccgacaaaagccctgaccactggatccgccgcggttgcgcgatgctctgcatgttggacacataaggacaaccaaccccacaagagtaatactccccgtcgtcaatagataaaaatgcaccttccattcctctcctctaatgacacgcttccgcttctcgccgcttcttccaggccgcaatctcccggttcgcctgcacgcgctcctcagccgacagcgcataataactctgcttcgtctcgcgctcccactaaataatagcaatgacaagcaaggtaaataatagtcagcacacagcttcacaaaacaccaacacctccctatcgtacctgcttcaccacccgcaccgagtgctgtgggggttcgtacgtgtgcgtggccttgaacttcttgttgtgcctggccagcagctcctgcaggttcttcatctccttcttctccttactggccgccgtggcagccctctctctcttccggtgcgtgttcagtctgttgcccacatccaccagcggcttcctcctgctctgcacctgctgctcctgctcctgctcctgctcctgcatctgctccttcttgccctggaacggcttgtgtgtggcgcgcatctccttgaggctgcggaactccttcttctcgctcttcagctgcttgttccgggccgtgacgatgctccgccaatcagcagcgactggacgctggttctccttgtcctccttgagctgctgctgttcctgcttctgtagcttggcctccagctcgcgcgcgagctccgcgcccggtcggctgtgctctggatgtacgcggtcgaaccagggatcgtgctcgcccgccgggagcggcgacagcggcgcgctcaagtcgcggtagctctgcggagcgtcgaactcgaagagcgggtcgatgcgcgccatgacggcgggaaatatggggccgacttcgaatttgaaatcaggagtgtgtgtttttgggcgcgggaaaatgggacagtcgtactttgccggggaaagcgtcgaccaccggaatgaagccatgtcatgaacaactcgacgatgttgaagttttgtagcgcattgcgaggtgctggcttgctttttagtgcagtatgcaaggccgctgcgtggcctttgactaatgtgaagacctaggtcgtctcggtattgtcgctatcgtggtggtatggtgaataggacgcaggagactgccaggcgcagtagagaacgcactgccatccgcgttgaccccgtagccagtcactgtcacgtcgagatgctggtcgctccagcaccttgaagttcgcgggtgcgcgccttgggtttcctcggattgccatgccgtcccgcgtgcttcgcgcggatcgccggcattttgtataaggtctcagtatgggcgcgcaatgatgacggcggaggcggcgaccgaacgttcgctgttgacgatgggcgtgctgaccgtcaacacttgctgccagtctcgggctgttgaagccaccgacatcttcatagtgtctggagaccccttgccggacgcctggttccggcgcactgcgagtctgaagatctgagcgcggccaccgcgctgcttcagtcaagagcgctgatttggaggcgatgggagccgatagagctgaaggacggatcccacaccgagccagcctcagatcaccggattcgacaccgacggatgctcttcatcgccgttaaaaaatctgtgccgggcttgcatttcacaggcttgcagaagcgctctcacttcaacgtgccacttcgagcgccgtacagtacctacactggagagcccctcgaactgctcgggctttgaaggcactgggctcgagagtcgagggccggattgccgggccttgaacttcagtcgcgattggtacagattgcaccctggtactctgctgctgagtactctcgccccagagatactgtatcagagcctcgcagcgcccgttgtgccatcttggccatcggtgctcaggcctcaggacagctcacttttcaattccccgccgaagccgcaaccaagtcttcctagctcctcgcctcgactccttctcatcaactcacgccgaccatgacgcgaacctcggacttggagaagaacagcctcacctacgccgacctagagtccccggacccgacccaccacctgcagcacctgacgccggtcgaaaacgtgccgtacatggtcaagagtcaattcgccaaggagatgatggccgagttcctcgccaccttcgtcaccatgctcttcgggctgtcctgcatgacgcaagtggtgctgagcagtgaggccagcggcaacttcgtgaccattgcgctgtgctggggtctcgccttcttcttcggcatcaccatcggcggcggcgtctccggagctcacttgaacccggcggtgaccacgacgctggcgctgctcaagctgctgccgtggaagaaggtgccgttctacatcctcaaccaagtcgtcgccgcctacgtggccgcgctcttcgtgtacattttgtaccggccgatgttcaacgaggtggatccggaccgaaccacgacacacaccatcttcgcgacgtacccgcacgagaacgtgggcaacttcacgtgcttcttgacggagttcgtggcgaccgctctgctgatcctgggcattttggcgctgctggaccagcacaaccgtcccattggaaagaaggccgtgccgcctgccgtcggagcattggtgagcacaatcgccatggggttcgccatgaacacggggctggccatcaaccctgctcgggacctgggtcctcgtctcttcatgctgtgcgctggctggggttcgcgcgttttctctctaagtcagtactacttctggatccccattgtggctccgatcacgggcggcgctgccggtgcgttcgtgtacgaggccctcatcggataccaccacgtggagaagaaccgtggcccgcacccggagtaccgattctaaacgtcgaaaaggtaaagttatctcacttgtaggttggttggagtgaggtgtgagcaacttttagtcgtgatgttcaatgtattcgttgcaaaaagttaccctctgtcctctgttgttgccaacaacgaaaggcaacaacttgttgcctttcgtctatgaacgttgttacccattattaggtatgagacccatttcatgaattatacccatttcctcatcatttgaagagaccaaaatcaagaggcaacagccatgagcaacgtcaacggagctcctcggcgctggaacatcgcggagacgcgcagcgtggcgaagcggaagaccgcgagcggcgacaagttcgtgaacaactaccgcctgctgcagacgctggggcagggccgcttcggcacggtgaagctctgcgagaggctcgcggccagcgcaactacgagtccagctgccagcaatggagacgcagagcctacagttgcgtcgctgcccccgccggcgtttgcgccgcgcaaggcgcgactgttcgccatgaaaaccttctccaagaagatgctgcgcagactgaaggactactgcgcggagcctgcagggggcaaggaagacggagctgcggaggcagatgcagagggtgaggtgcctatgaggatgcgagccgtaacggcgctggaccgagtgcacgacgagatcgagatcatgcgctcgctgtaccaccgcaacatcgtgctgctgtttgaggtcatcgaggccgacgacagcgacaagctctacatggtgctggagtacatggcgcgcggcccctgcatggtgtatcggccggatgcgaaggacttctacagccgggtgactggaggcactctgccggaggagctggctcgcagttacctatcggatatcctgctcgggctacagtatctgcaccagcgtcagatttgtcaccgcgatatcaaggtgagtgatgaccaagttgaggtgtcggtggtatgagtgtatgctgacgctgatgaaatgttgatacttatgcagcctgataacgtgctgctgaacgacacgggacgctgccacttgacggattttggctgtgcgaaggcgtttgctgcgtatggacacgatggcagtgaggcgatgcggttgacagacacggtggggacgtaccagttcttggcgccagagtgctgctccggcgagccgtacgaccccttcaaggtggatatatgggctgttggcgtggtttatttcattttcctgttcggcagactgccatttacgtcggagagcgcgcgagaactgttcgacgagatcactcgcgcagaggttgtgttgcccggcccagatgagtctcgccgcgatcaaccagttagtccagaggctcgtgacctgctacatcgactactagagaaagaccccgcgcagcggatcaccatcgatgaggcgtttcgccacccatggttcatgcaggatgaggaggaggaggaacctctttcgttctaatgcgtgtcgaatacgtccactgaaaagaagctagatcttttctggagttaacgcgggccgtaacttccaaatcattccggtttgagacttagtctgttgaaactcgtgttctcgtttgagtaggctttgaacctgcatccagttggcggcgctgtactcccgcggtaaattcacgcaacagaccgcggctagcttaaggcgtaagtgctgggctgaagtctcgcagttgaagtctgggtacgtgtggattaacgagtcttgcagcagaacagaccagttaacactcggcctaccattacatccagcttagaaacgaggccaggttggggttcatttctcgacttggctttcaagacgtatgcaccgattcaatacccgcctcaatcgcctgctgattagtgttggcttcaagaagcccaaacactcaagagggcagagcacgtcgagaacgccacagcagacattgagaacgagatggcgcgtacaagtacaacctgctcgccgaacgagaacctcccacttccgagtgcagactaacgatcggttgattcctcgagacgaagttgaaatggctccacatccgttccgggtcgggtccttcggcaagatttaccacggcacttggcttggttcgcgagttgtcgtcaagagagtcaagttggagtccaccaaggcccgcggtgatttcttgcgtgaggctgcgatctggaaaaggctgcatcacccgcacatcgtccccctgtttggtgcctgcatctcgttcggtgagaaacagacgcaaccagagggtctctttgtgtgcgaggaagcggaaaacggcagcttgcgggactttttgttcaacgagactcaggtgggtcgatcgccaccaatttggagagcgcttcgtgacgcagcactgggactgcgcttcatgcaccaaaggggcatcattcatggagatctcaagtgtaacaacattcttgtgagcaaggccggagtagcgatgctgacggactttggacttagttccgctccagctcatgaagaatcgtgcagcaaccctcacgaagcatcggagcttttcagtggaaggcaccggaattgtttgaaccagagtgcagtgccccaacgttcgagtcggacgtctatgctttcggcatgtgtgttatggaggctttacgtggtggttctccctggggacctctacctgatgctgcgatcagatacgccctcgttaaactcaagcgaacgttagctcaaggtggctatcagaggtcgatatcgacttgcatcatgccgaggcctgctaacgtgaaaaccgaccagcactgggccttcgtgaagcaattatgcgcttttgagccctcgaagcgactgaagctcaacgacgcgatcacaatactcgagagatttgcagaagtgaggcttctgaagccgcgcagccattggaaactgcgtagatattttattgcatgcacatatgcactgcgtctgtctacttcattccacgctgagtcggttgctccagttgagttttctcgttgtagcactcgtctagcatttgatgcgtcagttggaacacttcgtgaacatgaacgccatccatgccgtcaccagcaaacggatcctccatcgctctctccacgttgaagatgccggtcatcaacaaactcgttgatacgctgagcagcaagcagaagacgaagttcgtcgccagatactcgttgcccgcgcgatgtaaacgtagtaggggccgtaaaatacgggaagtaccaagatgaaaagccgagtgaaggagcgcgtagcttgaggcgtgcggtaacactaaacaagcacacaatatcgtataaactgtcaaagaatgaagccaagcaacacacacacgcatcgcataccttgatgttctggagcttttcgatgcgtgcctgaagcagccagtggtattggttgattcgcgaggcttcgttggcaggcatcccgcaggctttcatgacctccacttggtcgtgtagctggcgaatcgtgttgataatctgcaactgcaaatacttcacaggtgtcacatactgcaatgccagcttgcgtccatgcgtggtgaatcgatgccgcccccgcgtcagtgtaggcatgatcagcagcgacatcgtatcgtgcagcaacgattcaagcagcgtcttggtcttctgcacgtgatcctggggcaatttcttccctccattgattgtcgccccagttccacagcgcattggcgagtaaaatgttcaccaacaatgacctcgctgccaacaacaacgcaccaaaaaccaattagctctgatgtaaatacaacggtactcttgcagctcaccctcggcaataatgtccagcgcctgctctcgccgcgtgaaggcctgtctgatctgcatgatcatcggcgacaccacggcgaaggagacgatggtccacgagatgttggcgccgaagctcgggcccgagctgctcttgcccaggaaataatacagtgaagtggtgacgatcgaaaagagcactacaaacagcccctcgaacgtgatgagctggatgcagaagaccttggaggccgcgtacaggtccagcacggtgtctcggaagccctcgctcgcgcggcgcagcgccgccccgacgctcatctcgtcctcgctgctgctgggtccccataactcgtccacattttgcggcgagttgaaggccggacccgaatgcgctgcagccctggtgccgtactgcgcgtagccaccttctgacaccggagacctctttccgccgattgagtgacgaaacggcactaggtaccccgttttattgacctatggcactattttgccactcaaaaaacgttttaaaacggagtcgaagatggtgaaagtggatggctctgcggtgggcatcgaggcgtttgtggacgctactgaggagcgtctagtcatgcgtggtcgcattaagaccaagtacgtagggttagcaatgttggggatgctatgggtttgatggtaacgctgatgtctgtcggtggttgttgtgtcactccatgctcactacagaccggaggacttcgtggtgcgcgagatcagtgccgcgggtgacattgtgggcttcagtgatgagagcgacagactgccaactggtagtgagcgcgacgctgtgctgaagaagatcgaggaggcgtcgcagaagcagaagaaggagaggctggtgtttgatgagcctgcggacggatggcgagcagcgctgacggagctgattggagccaaagcttgtgagcacgttgaaggcgtcgcgcaaggccgagagaatgagtgctttcttgcttcccccgcggagtttcgggaccgcatttacctgcaaaactgcatccagaactgctacccgggactagactgcaaggtgcagaaggcgcagtcgagcgaagatcaagctgaggaacagcagatgcaagtggcgatggatcccgtgtacaaaaaacttcgagatggcggcatgaagattgagaattgcgatcgtttacttgctttccttcgaaaaggagcggacgatcccgcagcagcaaaaggtatgtacccaacagaaattgcaagagggctcatgtggcgattcgtaacagagtttttttttgcttgcaggacttgagttggagcatgagaacacgaaagaggctcggacagcgctacatcgcgtgatcgccaagagctcgtcgtctttcaagacgaagactgagactcggaatggcgtccagcgactggttgttcacttcttgccaaagagcaataagaagcgcaaacgctcccaaccgcaagcttatcttcggtttgtactccaaaaggtgggttacttgtgggtaccctcttgcaagttgcgctaagcgtggtcatttcgttgtttctcgcagacaaaccaagagcattttacttgctttgacaagttgacccagtggctccgtcgtccgctctcagcgttttcatacgctggtacgaaagacaaaaccgccatcactttccagcacgttgtggcgagtggagtgacacctgatcgcctccaaagtgtgaacaaaactgatgaaggcgcgccgaccggcatccgagtgggagaccttcagtatgttgaacatccactggcattaggcggggccaggggaaacaggttctccatagtcatccgggatctttcaagtgaaccggagtccagttccaagacaattcaatcgactcttgagtctgcgctggacaagatcaagcatcagggtttcgctaactactttgggtttcagcgcgtaggaatgcccacaaacacagtgagagcccaccacatcggcgagaagatcattgcatgcaagtgggaggaagctcttcgactcatcttggcagtacaggacggcgattccgaagatggtgccaaagcaaagcagctgtacctcgagtctcgcgacattgacgctgctctcaagctcatgccacacggaatgcctgtcgagcggcatgtgcttcagggattgaagcgcttcggaagcgatgcgttcgagcaggcggtgctgagtgtgccgttctcgcgtcgtgtgatgtacctgcacgcgtaccagagttaccttttcaatcggatggtctcgctgcgactgaagaagtatggcagcaaggttgtcgaaggtgacttgatcaagtgcgatatcccaagcgagaagtctatctcggtgaaggttgtcactgcagaggaagcagccgagctgaacgggacgcacgcagacgcgctgggactggtgtatttgccgctgcctggaacgactgtgaagttcccttctaactcgataaaggaagcgtgcctcgaggttagtgatacgcccgtagatattcacgcctcgaagctgacagtgaccaaatgcgttgtgtggtgtgttacatgtagatcacggaggaacacggcacgaagaatgccctctgcaagtctgggccggtgaagggagcttacaggccgctggtaacacatcctcgcgacttggagtggacgtggctagaagatgaagacaagggtgcgtgcatttacattgaccttctgctcaaatcaggactctcactgacctgtactcactcgtacgcgctgctgctctcagcgctctcgctccagctttcgttttctctcgacagtggaagctttgctaccatgtgcctgcgcgaggtgcttcactcagacctctagatcaatcgaatgcacaccatttcgcagtcaaaagcagcatcaattcattattcggaccggccgtaccggtcattcccctgccacttctacttcacgcatgaatcccgccgcctacatcgcctgtcagcggcaggtcaagtcacgcaacacaatacaggctctatttcttggcctccatgtcctccagcgcctgacgcacgagcttggcgcccgtgaccatgaagagcgtctgccagatgcccagtcccaggcgcggcacgatgcccttgaacaggcctccgtagccctgctccttgaccaccgtgcggaagacctgcaccatgttctgcttgggctcgccgcggtccgcggcgctctgcatctggatgcgcgccacctcgaaggggtggttccagcaggccaggccgccgccaacgataccggcgccggcctcctgggccaccgtgagcttggcgtccttgtcgccgtggaacagcaccttgaaccggccgcgcacaatctccgtgaagccctggcgcgacgcccagttggtggcctggcggaaggcgatggccgtgccgcccgggtagaagcccttgaggccgtgcgcgccgtacacgttgtggatgcgctgcatggtggagatggagcggtcgcccgtgacggcgcccgtgaccaggaaggtgcagggccccatgactacgacctggcacacgccgccgccggctccggccaggaagcccgtggcactctggcccacgcccgccgacagcagcgagtcggagatggcctccttggagaagagcaggatggcgcccttggacgccgactcgaccatcttggggcccgtgccggcccagaaggcggacacgccgccgccctcgcgcatgacgttgcggaaggcctgcgtcgtcgactcggtgcggtagcggcccatgcgcgtcttccagacctcgaagggcatgcccagcgtcgcggcctccaggcactgcagcaggccgccgttgaacaggtcgcgcggacccaccttcttgccggacgcgggcgggggagacatggctcttgggtgtggacgtacgaaggtgctgtgccggcttgggggcaaatcgaggtgtggaaaactgagtctggaggcgatatccatgcggagagagccgagccaacttgcgcttggttcaactaagagcggacagaggcgctgatatcctaagctttaaactgaatagtgaataaagcttaggagatcaggaatacaatacggggtcacgtcgatctcggccacgtacttggctttgtgacgtcacggtgtcggcactgccggcagctcgaggacgtcagcctgcttcgccatgctgtccagttaatgcgaggctttcgccgctttttccggggcatttgtctccgctgcacgagcgcatcaacagtgtggcagtgtttccttctcgccagagtttttgcgttgtacatgtacgagcggctgcaactgtagttgtcgatgtccacgcaacgttgactcattgagtatagcggttgcggggcactctcggacccacagtgaaacatgtgcaggtgatcgaagtgcatttccattgtaagatgaacctgcgcttcatattcgctgcttgaggaggatccgtgggtgtggacgaagcatacagctaccggtggtagttcagtaccaggcacgaggacaatgaggaccctccggtgagacgttcttggcgcgctaatttgtccacatatgagggctgctgcctacgggcatttggtcgaccagctgacccggaggttgttgcgcgccatatcgacgtgccctcagctgttgcggcttcagcagccaagcccgatgcgctggaacgagtcgctcactgccttgcactgaactggaatcggaaggaagcgtttacagttagtaagcagcgaagcgtttacttctaacgttagaacaacgcgcacggtcggcacgggcgattgaaaggcattgcacctcttcatgttgaagtggccatagctttctagcttttgagctagacctgtaggaccgctcgcaactttgtagaatcagatatagagtcagtatggcatagcgaaaccaagcttaatccggggcctcggcgcacgacactgctgcgtgcagaggacaggcgcctcaagcgagtcagttacctatatcggcagtgcatcgagagcttccagcggcgtcggaaccgtcagagcggagcgttttccctcgcggcttctcttcctgccgcccgaagtccccggcgccaccaagccgactaccgaacagccgacagccgccgccgtgccgcccgagcagagtcagaggcgcgcgcgacttcccggtgtgccctgctgtttcctacgcatcatttgggatcgccccttctttcccgtcttgtagtggctggagaggcaggcaggcgagttaggtagttcgcgatagacagcgcgccgactgctgggatcgaataaggcgacggacgaccccccgaccgactggcgcgcgtgtgaagccgaggtaaatggcaaggtcgcacagcacagagaccccgtaccgccgctcccagtccgtcaccagccactcgcagcagcatcgaggcacgcccgtgctggaggagcagaactacatgagcccgtttagcccgccgtccaacggcctctacgtcatggagacgccgcaagagcgcgacggcgacgcggcgcgcgacggacgccgctccatgcgccaactgccgcccgtggaccagaacggctccttccgacagcgccacggcatcacgcgcggcgcgtccaacggcttcgccaccatggacaacggcagcgccatcagcagctccagcgggaactacattgacgccatgagcctgaacaacaacaacaacatgagcgccacggcgcagcagccgctcatctccacgccgcgcgccacgcagaagaacatcgtgcgcgtgatcgacaaggacatgacgcagcagttccgcggacgctccaagtcggtgggtcagggacgcattcgctggttcgagaacaggaagtcgcagctccttgggttctgccttacgatggctttcctcggcgtgtcggtcgccatgtacagctaccgatggacgggacttattgctggctcggtgaacagcctcatttgcggctccgctgttgttatcacgtactgccgcaagaagcagtggcaccagcacccgaacccgatcgtgcacaatcgctcggtactgagtatcttcatggcggtgtgcttgctgttgaacgtgctggtggacttcgacccgagtggatcgaacacggactgtcagcgacttgcaggtatcacggaattcttcttcttcacaggcgaggcgtggggtctcgtcatggcttgcgatctgttcttctcggtatgtcaactgttattatgcgttgctcttagcactagccaggcctaacgttcttgcctttgacgcacagctcacgagtccgttcacgagctacaaacgactgatgaaattctaccacctttgggtatggctgggaggcattactatgggtgtgatcacgtactcggtccaaggtgctggcggattcttcactgtggacggccagtccatgacctacgagaccgacacggacactgtcatcggcttttgcttggcttcatcgcgtatttgctgcgattctggcgaaacctgccctgacacgattcaaaagtgctccactaccgcgagcttcttgaacgcgcagaaatggtgagtatttctccgctcaacgtacacaggaaaaccacgactaacggatgttgtgcgaacttttttttcaggccctggattttgatttacagcttcgtgcttctggtgctgttcgtgtctgtgtggtaagttcccgaaccaaaatggctgtgcgtatgtgctgctctctaataacatttcgcttctttccgtgctgtagtgtgctgacgttggcgtggcaccgcctctacctgcgtggtgtccccaagacatacaacattcgccttcgtgtgctgaactacatttccttgtaagtgcattgttgctggtatcttgctcaacgatggtatctcacacctgtaacgctatctgtgatgtatagcttcacgggcgcgtatgttttctactggttgctcctgctgcttctctacatgtgcgcgtacttcttgtcgaccaagagtgacacgttaaactcgaaggccgttgcgcaggttctgcgtcaattggtcatcttcctcatttcgtcgaagggatatctcgactatgtgatttggttcgctgtgaacaacatcaacagaaagagtggaaacggacgcgatgaatcggcagatgtggatgtcgaccttagcccgcaggccaacacggccctgcgatcagaaattctgtactacaccacctcaggcattaaggagtctgttcgtgctgtgactgacgagctgatcaccatcccgatttctggcgaaggcgatgcggtacgttgatcttctgttcttttcgagttgaaacttggagcctgacttgtgtattcgtttctatcaccaacagggcaagtctatcaagttttggtcattctgcccaacatctttccgcaacattcgattgacctttggaatcagtgacgccgactacattcaaatgtttggcgctacgaccaaggaacgattcagtgaaggtcgtagtggtgctttcatgttctacacgtctgatgaaagtctgatcgtgaagacaatgtcccccgaagagtgtgcgttcttgcgcaagatggcacctaattatgaggcctacatgaccagcaaccccgacacactcctcacgcggttctacggttgccactccgtctcgctgtacggaaagatgtactacttcgttgtgatgggaaacctgttcgcggacacggacgttgtgcatcaccgttacgatatcaagggatcgtgggtggatcgtaatgcgaaggtcccgagtgtcggtgataagaccgcgtgccgttactgcaacgcttcgtacacgttcggcagtaccaaaaaccaggagtgtggtgacggcatgaacttccacgagcccgacattgtcctcaaggacaacgacttgatgaccaaggtgcgtcttgttgcacttcatttgcacagctcagtggtggctaacgttgttattctctcttgcagattcgcattgacccggcaacagcccaccgcatctacgaccagatccacaaggacagcgactttttgtgctcgcagggcatcatggattacagtctactcatgggtattcaaagctcggagtactttgtcgacacaagccagctgccgcaagcccgtcgcgacctgctcttcacgcaacctgcgacgagcgtggctggtccgtcgctctaccatttcggtattattgactttctgcagcagtggtacgtcatggcaagcttccttggctccatgcctgtgttcgattgataacgttgtatatgtccaaacctcctttgtaggacaatggaaaagaagatggagcggttctacaagacgttcgtcaagcggaaagacccggaaggtgtctccgctttgccgccgaagccctacaagttccgtttccagcagaagatgtcgcgcatcttcgcgctgtcgacgcacacgcgcgctgagaacgacacggctttcaaccacaactacccggcactgatcgacgtgctggaccagggcaacttcgacacccagcgccacaacaccttcatcaacaactcggtgatggagcagagaccggtgttcaaccccgacctgcagcaggacatccgcgtggtgtagctggaatcccgaggcgtagtgagtaggggccctgagcgtcgtgctgcatgggccccatttttgataagtaggaaagaagagagaaagaaatttataattacgcgactccatggtcatggtcatggtcatggtcatgatcacggtcatggtcatgatcacggtcatgctcaaattgacttttgcagctatcgaccgatacaaaatgctgtttcgaattttggccaatcaggtggccccacctagcgcgatagcagttccccctcacaacagaagtgccgagccaaaagcctgctctcaacatggtgaaggtgcgtctcgttcgtctctctccgtgcacctctgcgacggactgggaagcatagttggtggtagctacttagaggccgatcgtatcctgattgctgaccgtttggctgcttcgtggacgctctgcaggcggcgtctccgagcgtgaaggcgatctttatcctcgacagcgatggcaaccgcgtgtgcgccaagtactacgacaagtcgtacccgacgcagaaggagcagctcgatctggagaagaagctgtacgccaagaccaagaatgccacgtctcgtgtggaaggtgagagcgctgctggcggtggcattgaagactgtggagacggcattctgatcatggttattgattactatttgtttattgtgtagccgacattattctgattgagaacattgtgagcgtcttccgctgcgggtcggacactacgatgcatgtggttggctcggcttcggaggtgaggagcagcaggctggatggacccagaatgaggagtggtgggctgattggagttccttattgttgtagaacgagctgatcctgctcactgtcttggactcggcctacgacgctgtcagcaacttgctgaagtacgtggtattgttattgaacgtggaaggtttggcgctgaaactcacgtggatgacttgtctgtgacgcaggggacggatggaccgccatgtcatgctcgacaacatcgagctggtgctgctcacgttcgacgaggttgtcgatggcgggtacgcggatgcaatatgctggtttgctggatggtgttcatggtgatgctgaatgattttttatttctcttacttttgttgcagaatcattctggaagtcgacacgccgtccatctcgaaccgtgtgcttatgcgcgtaagaatctccgtttgcgaagaatgctgtgtttgttctgatcgccattctaacctctcgcttcctttcttcctttattcagggtatcgacaacgaagtgccaatggcagagctcaccatttcacaggtgggtttgtgtgcagcttattactccgtattaccccgtccctgtttgcttacttcgcgttttctttttatctgcataggcgtttgcttcggctcgcgagcagttctcgcgctccttccgcagctagacggcatcctgcgtgccacattaaatgtgtctttctctgctttctatcctgctctcccaaacacgactccgttgtgatttttttatatcttcctggccttcatgtacacatgttgtctgcatccgtggcctgcaatgcacttcacagcgtcacagctaaactggacagcatgatcgtggtgctcggcatctctattcgtcagaatcaacgccttctattggtcaaaactaattttgcactacgagcaaggtagcttgtcatttcccaccaggaaagctggcgaccaagctcttttgtctgcggcaatggcggcgaagccggagaagaagcacaagccggagcaagagcaggagcaggcgcaggccaagccgtggggccgcttcaagctcgtgtccaaagagccggcggaggagagcgaccacatcaacttccgtaacaaagtgaccacgatcggccgcattaaacgtcggtgcgaccacgtgatcagcaaacctttcatcagcagcatcgtaaggcaattctaccccaacgcgctgtattgggcaatgattgctgcttgtctgctaacgtttgagctttggtgatcgctggttggcttcggtagcattgcgttgtacagttggagggcttggacacgaacggagaccccgtggtgaagctccacgacaacaggtccgtctagttgcgtgtcgttatcgctgctagtttggcagaagctaatgaaattgtggtgttttgatgcagtcgtaacggtatttatgtcaatgaggaagcggtgggcaagggagcctcggcgcagctgggcaacggatatacgattcacttcactaagcctggcacggcttcggcaggtacgtgagcacctgtgcttaccaagcaacaacgtggctaatataaactgtgctgctgtgtttcaggaatccctccgttggcttacaagttcgagtttctgaagtacgtaaagcaaaaccctttgaggtattcaaagttgcttgtgtaaacttacttaatgtgcatttgttaggtctcacgagtcgaatcctgcctctccacagagtgatgtggctgtctcgtcgaagagcgaggcagcggccccatcgaagagcgaggtcgttgaagcatcggaggatgtcaacatgacggttgtcgccgatgagtcttttgaggcaacgcagctggcggatcctccgtctccgtcggagaagaagcgcaaacgggcggacgaagagcctgcagtcattaccgttgccacgcaagagcttgaaagcaaactcaagaaagccgaaagccgaatcgcagctttgactgtggagttggagaagagagtacaagagaaggtgaacaaactccagcaagagaatttgagcctgatgtcgaagctggaggaagccacagctgagaatctccaactgaagacggatttgtccgcgaaagacagagacatggaagtgaaggtcaaagaagcgataaagaagcgagatgagagtgctgcggtagagattctgaagctgaaagaagagctgactgccaaggataaaactatggagctgaagattaaggaaaccgttaaaaagagccaggaggccgaccgcgaagccaggacccaagaaattgctgcaaaactcaaagaagctacgaagaagtatcagcaaaaggtggaggctgaacactttgagcagcgacgagagatgagcgagaagatggcggccttttccaatgaaaacgaaaagctgcagacaacacttagcacgaaggaggtagagctggccgaatgcgaggataaactcgcgagtttgcgcgagaaggtcactgaactgacaagtaccttggccgaaaaggagaaggcgttggcggaacgtgaggagaagatcggggaactcgaagaaaagattaatgcgtcgaaggatgagagctcggagctcatgggactccttgcagctgcagaagacaaggtcgtggctgctgaaaacaaggctgcagaagcttctatagccgctgccgaggccgccaaggccagcaaaagtggtggtgatgcgaaggagcaacaagagctgcaagcagctattgcatctcttcgaagcgagctcgaaacgcatcgcgccgagcttgcaagctctaaagaggaggtacgcaggcgtgttggtgtcgctagctctgttcacacctaatgctgtatttgtattgatgtgcagctgaagcaacaacgagaagctgcaagtgctgctgcgtctgcatcgacggagtctcctccaactgttgctgccgaaaggtaggtctgtccccgtttcccacggataattgctgcatgtagtaaccttctgctcgtgatgtcaacaagcagtatcggccaagacgacgacgtcgagactctgcgcgctcggttggccgctgtattgaacctcttcggacaagtgcaggctctcagtgtccaaggtatcagcctgatcagcggaactgaccgtccagagctggcggacctccacctcttgtccgctgcatcagcgcgcacaagcacggcagtgccggactcgcctagctcttctcctagcgaggaaaacgccgaagatgacgcgaaggactcacctgcgaagaagccgacgacggagaagaaggctgcgaagaaagccgccaaggacgtcagcatcaaaaccgagaaggctgatcacaccgaggacgatgcggatgacgctgcagcggagcccaagtcgtctccggccaagttgaagcgggagaagaagaagtccatcaagcaagcggcgccgctgtccgcagcgatcgaagccgacgccgcctcggcaattgcagccatggcatcggcggaaagcagcggcaagagctccccgagcgaagcgagcaccgcggtcgccaatggcgacggtgactgggaaatgctggagtgaaatacgtactaaggttttcgaagttattctactataactgcgtaagaaatgctcgtgcagtgcacccaccgtgccaaagtctacagtaacatgtccatgggtttggttcatccatccaggcaatgcaaatcgacactttggaaatgtgccacgcacgatttgaatctcttggccaatcagagacacccatgcgcttgtttttgctacacaccatccaacaaattgcccaatttgctgcttggggaccgaccgccggtcattactcgactcgcccccgacgcctcaagtactcgccatgctgcgcaccgccttccgtctccgctccgccctgccggcccagcgccgcgtcgccgcctgcgtctcgcgcggcttcgcctcgtacccgccccacgaggtcatcggcctgccgtgtacgtcaccgcacggatatctacgtatctactctagtggagctcttgggattgacgatttgacaattgtcttgtattataaaaattgatgcagcgctgtcaccgaccatggagacgggcaacatgtccaagtgggtcctgaaggagggcgacgccatcaacgccggcgacatcgtgtgcgagatcgagacggacaaggccgtcgtcgactacgaggccacggacgacatgttcctggccaagatcctcatcccggagggcgccgagaacatccccgtgggccagcccatgatggtggtgtgcgacgaggaggagtccattgccgccttcaaggacttcaagctggaggacgctccggcggcccccgctgcccccgtgctctcggaggagaagccccccaagaaggaggaggttgctgttgacgtcaagaccaacgagcccgtggtgccccaggacttcctggtgacctcgcagaccacgaagaagacggtgcccggcccggccatcccggcctcgcccgtggctaaggctgcccctgcccccaaggccgctgcgcccgccccggctgctggcgccgtgtttgaggagaagtggggtcttggcatcaagaagagcgccatctccacgagcctcatcaagaagcagcaggcgtacattgccctgtacggcatcaccggcatgacgcccgcggcgctgccggagaagaagaagtaaatccgctgctagtactagcgataggttcggcaagctcatgatcccccgttgcgatgcaaaggatagcattgctaatttgttaatgaaagcgcggagctgagctactgtagcctcgcttgagcttgcttgcaaaaggcactacttaaggatcacaagcctctcgactgagctactattgtgacttactgaggaacagtgatactcatcgagtgaaccttctccaggtggttgagcacgccgaacgcgtccaccgtcaggaagtcaaagagcccggggtgcttcgcatcaagggcctgcaataaaatacagtaggtcaattattacgctcgcgactactgcaagaagggagcaagatacgcacctggtactcgttcagatcgatgactccgttgcggtccaggtcggcgtccaggaacgtgttatccacaatatggaccagctgatcctccgacaacgagatctccagctctgttttacccaacaaagcacccaaacaatgtcagcaaaaggacaccaacaaaacagccaccggaaagatacgcatcacgcaccgctgcattccgcaagacacgagcgcaggagctccgtggtcattttcttggtgatgaagcccgtgccctccgggtccagcagatagaaggacagcatgagcttctgctcgcgcgtggccttctggctcagcagcgacaagcccttcatcaggtcctcgaacgtcacctgcaaacacaaacagtagagacaagctataagtatccctccaaccctgcgttccccctccgtcccaagatcttacgtggcccttcttgtccatgtcgaagattgcgtagaggcggttgacgtagaggctggaggtgttgccgtcgccgcccgccaagaagcggaagaactcgtccttagggatgaccactgcgtcgttctcgtgctggcccagcaccgccgccaggtgcttgcggatggaaagcatctcgtgctgcgagaacacggcggacacgtccacgtccgccagcttcgtctccagcagcgagtgcgtcggcggcgcgggaggcggcgccgacacggtgcgaggcgcgggggccggagttggagctgggacaggagcaggggcaggagccggggccgacacgggcgcgggaggagccgacagagtgggcgcagacacgggcgcactgcgcggggcgctggacggcggcggcgacggcggcgaaggcttggcctgcttgttccccatgacttgctgcaactagagaaggtctcgaagtgagcgcaggatattttacctggtattatattgctctacaaatgtaggagtcaaaagacaaaaacccaaaactgctctacaagtgataagagcacatggcgcataatctggagaaagtcgaaatggtggtggtgcggtcgagtacgcgcgtgcaggaggaaggcaaggaggcggcggtggccgtgcccggcgaagtggccgaggccatcgccatggttcagagcgactctccgttcgtggcggccgagggcttctccaagctctcgcgcgccacgttcaacaaccgtgagttggcgtacagtatgagagtcaattgaaaaccgacaactaaatcgctcttcgttctttgatgcagcggtcgggaaggaagcggccggtgaagcgggcgccattaaggccatcgtggacgccatggagcgcaacatctccaacggaaccgtgcaggaagacggctgccacgcgctgcgcaatgtcgcattccactgctgtaagctgaagtgaggtcctgggaatgcatcggaagctggagagctaactggcatgttgtatctctgtgttgctgttgcttgtttgcagtgcctaatctagtgctggttcgggagcaaggcgcgatcgccgctgtgctcaaggcgatggagacgcacccggagaacgaagctctgcaagccgagggctgctgggcactgctggtcttctgctccaacacgggtgcgatggctgttgttgttttctgggtgaatggagcgaccacctcagctcatttggtctgattgttgttgcatatttgagcagacgagaacgccgcggtggccaaaccccatgcgtcgctggtgcagaaggctgtcgctgcgtacccgtccaacaccgacatccagagccgtggacgcttcctgacggtgctccttgcctgatctggtactgttctcgcagcacggcccaacctctaggtggagacgcaggaatgaaggtggattctgatatcggcgtagacgtagagcatatattactgtctctctgcctgtttgctgcaacagcagcagaatcaatggtaggccatgcattatacttatacttgctgcttgaacgacccgtagctcgcagtgccgtatcccgtaggcgtctcgtagaggccgtactccgggtgcttgtggcgcttgtggatgttctctagctccacgatgctaagcacactggagccaagtcccagcaggcagccagaggcgaagggcacgacgcaggcctggaacgagaacagcaccgagaacgggtccatgaactgcagcgtcgacgacaggaagaagccgatcatcgccatcatgttcaagcctgcaaccaagaaaaacacatcacagtcagcacagggttcatatcagcaaaaaaggttatggatagcgtgcaacgcaccagtgacccaggtctcgagcgttgtgaggcggcacgagaaccactggtggacgacctcgacgtgcgccaggtaggcgctgagcagcagcaggaacgacccggcgaagaagggcacccagtagcccacgatgaggctcagctcgtcgcgcttgacgtccacgacgccaaagttgtccgcgtcggatctcgcccacacgtaggcgcgcgcgaacacgtagagcatggagccgagcatgcccaagatggcggtccagaagtcgatgcggctcgggaagaagcccacgtactggcgctccagcacgggctgggtgccgtggaagtactcctccagccagatctcgaggttgtggcagcagttgatgacttccaggtacgtgatggcgtggtaggcgaggaagaagacggcggcgagcagcagcggcaggtccacggacgagtgcacctggttgcccggctcgcgggcggccttgtagccgcgcgcgccgtgcgccatggcctcgcccgcgacgcccgagacgaagagcgtgaaggccacaatggcgcagaggctggcccagaagctgagcgaatagaccttccaggtgcggccgtgccacgcgcggtagagcgtggtcatcatcttgcggtgcgcgcgcgaggaccagacgatgcgcttctggtccacggtgtagaagtccacgagcgtgggcgagaaggcgtcgacgccgtagtagaccgagttgacgctgtcgggcgcgggcacgatgagctcctcggaggccacgcgcgagtaggacgacgacacggacgacgccgtggggctcgtggccgcgtagccgccgtgctgcagcagcggcaggtccttcttggccaccatggacgtgagtgtagcacgaagagagctgaggcctgagaggcgaattcaagactagggcgaggctgcagctggcgtactggcggctggctgtcgctcggtctgtttcggggctgggaaaatctggaaaaactttccactcgcgttcctgaattagaagaggaggtcctcgtatttctgggcaaagcttggctggccgggaagtggagttcgttgagccgagcggagctgagtcgctttgcgctcccttccttcgaggcgatggacgtgcgcgcgagcgggagagatgctaagtgagggcctcggcggcgccagcggcagcggctggccccgagactatcgatccgtgatagatcttggggcgttgaagccggccccatgcatagacgggtacgccactggttttcagtatgccgcgtttcgaatttcgcgagggaagctcgcaagtgatccccccagtggggggccccacgccaggcagacctcgcgctcggagccccgggctgggtgccagcaagcccgcagcgccggcagtgcggtggcgccggcgctggcacggcaccggagctgatcctcggcggagcggcggctggcgaggctcggggtgcgcagataggggcgaaacagcgcgctccgcttcaagctggggcgggcaaaggaattttctcgcggattccgctcgctgctggctggggctctgctgcctgcggctgtcgggtctacactgcaagcccggctgcctttcacttcctggcaggcaagacaaggtggcctccagcagcgacgcgtgcagctggcgcgtgctgcttcatctcggagcggccggtcctggccagacgttgccggggtattgcgtgcagagcaaccacatcctggcgtggcggcgttactgcgctgggtctggagcgccacaaccagaacccgctcgggcaccagcgcttcatcctggagccacgccggagcgagccacgtagcggtgcagcacctacttgtctcgagggagctgctgggtctcgcgttgcaagccaaggccatgcaggcgtccaagggcaaggcacgtcatgcagctgcggcgcgggtcactttcagaaggacgcctgattccacccagacgcgccgtgattggctgcccaaaggtcgttcgacaaaaagttcgaacgcgaccgttcgctgaacgatgcgctaccagcacatttcgggtttcgtatcgggcataaaagggacgaaatatcacaatagactccagcgatccaaaactttttcgcgtcgagcgtccaccgatggcggcgaaccacctgctcgcggcgccgccggccttcgtgctgcccctgtccagcgacgacgaaggcgagagcgacgtcctcgaggtggaaggcgtctacagcttcggacaggtgcggcagccagccccgcattgccgttggattcccatgccaattaacgtttaattgacgtccagaacacgtacggagagctggcgctgggcgatacgaccgaccgcagcgcgcccattcgggtagatctgggcaacagcaaccacggcagacgtgtggtggatgtggcctgcgggaacgagcagactgccatcctattcggtgcgtcggtaaccatgtacgttggtggattgggctgcatctgattgaagcgtgctccattgtgcaattgggttagaggacggagacgtgtacacgtgcggctataatgacaggtagagtacttcgatgtttgctgcttttgatgacccatttggttgcaataaggtagtgcaactgacctctgctttggttgttttccgtggtacttgcagtggacagtgtgctatcggcacaacggagcgagtgccgacactgcggttttctccgggactgagctctaaccgcacagtccggattttctcgggaaatggcagtgagcaccttgcagcactacatggtaagcggtctctgtagtgcttagaggaatgtgtgtggatatgcctctgacttgttggggtggctgttgctgtccgctagcaaatggcaacttgtacactgttgggttcaacatgcgcggacaattggggctaggctcgtcgacaaccgtgatggaggcgacactggtcgaagagctggctggcaagcgcgtagctgacgtgggctgcagctacttccacacggcaattgtgatggacaatggcgacctgtatgcctgcggctgcaatgactacggccaactgggcttgggtgaccaccgtaacggtgagctcgtgcctcgaccagtagagtacttcttccgacgccccgtcctggcagttgcctgcggccagcattacacaatcgcttcgctcagtacgtgatatcaccttctaggtatggggcataccaaataatggtgcaacgtgctatttggtgcaggggacggaggtgttgttgcctttggtaagaatgatcatggccagcttgggctcgacagtacgtcagagccggtatcacagccaacgcggcttgccgcacctctagatcgactcgtggttccgcaactatcgtgcggataccaccacaccgcagttgttaccgaagacggcgctgtctacacattcggtcgcaatgactacggccagcttggtctcggacacaagatgcacatggcacgcccagcggtacattaaagtgtgacagaatacctagtctccaggtcgtgaaaataatgttttgtgcttgtttgtttggaatgctatttagcgggtagaaagcttggcacgaatgcgaatcactcaggtggcgtgtggttgctaccacactctcgtactctcggatgacgggaaggtgtttccatttggccgtaacaaccatggccagctcgggttagagacgtcagttgactgcttgagtccacaactcatatcaactctacgaaacaaaaccgtcaccaaggtacgcgtctcgaaagaaaacactgtagcctacatattattgattaatggcgtcgattcttgtgcatctaggtcgctgctgggttttaccattccgtgtgtttagttggtccgactgaaggcgagactccaccagcacaaggatcaggaacactgaatggagacctgcgcaagatgctaaacaactcaactcggagtgacgtgacttttgtggtggagggccgtccactcttcgctcacagctgtatcttggtagctcgttgtgagccgcttgaaaagatgctggatggccgaatgaaggacggctcgttatcggaaattataattccggaatactcggtgagtggggtgtgattgttgtcgtgataaaccgtggaacttacttatcaatcctgctctttgatgttgcggtagtatgatgtcttcgcagctctaatggaatttctctacacggaccaagtcgctgcgctttcactaccagacgtgactgcaggtacgagttagttcgtttccttgaccgcaaattgcacgcttattcttttgttgctgaacagacttcgcgctggagctgcatgcgctggctgatcaatacttggtcacaaggcttcgaaggtacgagtcgcttcctcaacactttggagttctcgcagttgatagtgaatttctgtcgtttgtgtattatggcagcacgtgcgagagcgcattgctacaaattttatctgtggaaaacgtcgtcatcatcatggaggtttgtacagctagctcgtcgatgccatcttgagttccttgcgcgatatccttatgtactccgatgctctgtggtgtgcagtcggcccatttccgcagcgcgtacacgctgaagaaacgttgtttgagctttgtattggaccactttgcccgagtgatcgcaacccaggtgcgacggccttcttcctttcaatatctgtctcctacctcattgacttatgtgggtttgcgtatctgtaggctttcgtcgggcttcctcaggaattacttcaagaggtgttgctcatggcatctcaacagggggtatccatccctaatcaagccaacactggtggtggagcttgcagtgagtacctccgtgaacgttagcgccatgacgttcatcaaaagtgtcattgcaagcaaccgggatttaagcgggcgcaatactactactataaaacaaccagccctaactttcttatcactagcggagcatcacggtcgctgcgctcatgttgctttaggggtcgacccccaaaactatgctgaccacagagttttggacgacgtccccacttgaggaatttgagtacaaagccgcttgcaaaatctagcgctttatttcccctttcacgctccccgatatgctggctattttgcaaacaacataccattcatacgttgttatttacggtagactgatacacctgacttgtggttcgaatgccagtacacttgtattttacttatgtaatagcagaatgtgcacactcgcacaacgaaaagtgaataaggggttaactttcgatgtttcaatttcgtggtgtgttcattttcagagtgaaaatacgagcgaattattccagtaacctttcgcgatccatgttgaaattcttcctccagatgtcatctgcacccagccgcaatggccaatgttgctgccgcgactatggcatgcacggctgttcaaaactgttagtctgcacgcgtaggtagataacctcatgcacgttgagcgcaataaggaaacatatataatgaacgataactagctcaaaataatgtagttgagcctgatatcgtaccatcacacatgcatgtagggtatcaaagcagagctgcgacgcccgagatcgacccaacagaactgtaattgagtgggctaatgtatttgcttagtcgaacatcttttcatgagcaacgcaatgaatgaattaacgcagactggaaaggagcaaataatcggcgcctatagcgtgcaggaaggacttggagctgtctgatctcttcaaagcgaagtagcaggcgagctcgaacgggccaaaagagagccattattgctaccaagaagcaccgacacggactccggctcgtacaccccagctcatcgtccagctcgtcatccgcgcatagccttcaatgtaatttagagaattgctgctcgacagtacccggtcatcagcatgcaaagctgcttgctacttggcgtagcgttggcgcttccttgaggctctgcttgttgatgcttggactctctgttgtgcgctggtcaagcgatcccgaagggccgcagacttcttgccaacatgacagcataaggtttgaaaggcaaataggcttaataaagggtcctaatcgggtccaaataagggtaaaatgtcacgtttaagtctatttctgatgtcctccatactaacggtcgaatttgctgtttcataacttcgacccgctggttttatagcatctaaagatagtgacgtcggttcagctcagaaaaatccgtgccgataccacctaccgataagcatataaatgttgtttaaccgaggtatttttttcattttttaatccccgtgtgagcgattctaaattgtgaccctaacccattcgcagaattaatgtaaaaaataaagcggagtgtatataagagacgtaaaaactccataaaacggagtctcatgattaggggggacttcgcccccaaaaagagtgcaaacgctgctctattctctgtgatcaactcatttctgtgagcatactaaccggcgtttcgaggtacgccttccactgattcgagaagcgagccatcgtcgctccgtcgatcacacggtggtcaccactccaggacacattcattaggcgcacgggctcgacgttgccctctgcgtcgtatcgtggaagcttctggatctggccaatggctccgatagccacttgaggaaccatgaggacggggctcatgtacgtgccgccaatactgccgatgttggagatcctgcacagcgcatattgatacagattagcaacagacgactaaataaatagcaaagatggaaatacgtacgagaatgttcctccggtgaggtcggcgggggcgagctttcctgcaactgcgagctgctgaagacggttaaggtcctccgcaatctccatgatgctcttcgtctgcacgttcttgacgttcggtacgatcaggcccgtgggcgtgtccatggcgaccgaaatgttgtgagccgcgacaagtgtcagctccgtctcggtatcgttcacagtggcattgagcatggggtagtgcttgagcgccagggacgcagccttgatgatgaaaggcataaacgatagcttcacaccgcgcgactccgcgagcggcttcaactccttccggagatcgtacagcgcatccattcggatctatcgtacaaacttcagttagcaccttgaaataactccagaaagatactcgaagctcacctcatccgcgtagccaaaatgagggacctgcagtgccgcattcatcgacttggccatcatcttctggatagctgcattcaggacaatcacaaattgtcagcacgggacacccaatccaacacgccataagcagcataacaacttacgcgtcagcggcaccactgtgtcttgctgcaagtacaccgcattcgacccgtcgacagcaggaggaggagtagtagccgcagccttctggccgccagacgtcgcaggtttcgacggctgggcagccagcactctgatgtactccagcaggtctcccttgaggatgcgaccttgcgggcccgtgccctccacatcgtgcaggtcaatgttgtgctccttggccagtcgccgcaccgacggtgacgtcaaaaacttctcgtcgctgtcaagtctacgaggtgcgatcggaatcctcgaggcgacgggcgtcgaggcctgcacgggcgtgggggttggcgccacaggagccggcgccggaacaggagtaggagtaggagcagcagccacgggcgtgggggcggcgcgcgggatgggggacgccttcttcttgccgccgccctgcaccgtggcggccgtggcctcgtccacgtcgatgtcgatgagcgtggagccgaccttggccatgtcgcccacctcgtagtgcaccttggtgacgacgccgtcgtagcggctggtgatctccaccgtggccttgtcgctctgcacctcgcacacgttctggaactgcttgacttcgtcgccgctcttgacgaaccactgcagcacctccacctcggcgatgccctcgccgatgtccgcgagcttgaacgggatctcggggaacgcagtgacggcgccggcgtggaagccgcggcgggtggcggccaggcgctggcccagacgacgcgcgcgcagcagcgaggagcgcatggtgacgattcgatcgtgcgttggttcggttggggctcaaattggggaatgggactgcaacctgcaagcgacgccttggttgttgcagtgcctcgaatagagcgcctccgtgacgtcgccggtgattagggctgctgttccaaaccagaggcagaggatcgggaggggcgacgtgctcagttaatctcatcacttgacaccacgttgaagcgggcccgtgtcatcttcgagctgtacatgcactacaacatccttccagtgctgcgtgggtccacagcctttagcttggtgtcattgagccgctcatttcccctttcccccgccaagaccgaagctcccctccctcctctgtccagtgatacaaaagttctggtcatgacgctctccgttcaagacgacgcgctcttcctgggcctggactgctccacgcagagcatgtcggctgtggtcgtggacgcgcgcggccacgtggcgttcgagagctccttccgcttcgacgagcgcttcccgcagtacggcacggacaacggcgtgctgcgtcccaaggagaacgaggtggtgatcccctcgctcatgttcgtcgagtcgctggacgccatcctggaagacctggccaagagcccggtggacgtgagcaagatcaagagcgtcagtggcagcgcgcagcagcatgcctccgtctactggagcaagggcttctcgctgggtgcgtgcttggatgccgccgccgagtctggtgccgcctcgatggtggaggccatggagaagcagcagcagcctgcattctgtctaccggacggtcccagttggatggacagctccacgacgcaatactgctctgagctggaggccgccgtgggtggagctgaccgcgtcgctgagataagtggctctcgagcgtacgaacgcttcacgggcaaccagatcgccaagcggatccacgaggaccccgagttcctggagaaatgcggccgcatcgccctggtatcgtcgatgctgacttcgctgctgtgtggtgactacacccccatcgacgacagtgatggatcgggcatgaacctcctcgacgtgcgcgagagggtgtggtctcctgagctggtgaaggccaccgccaagtatagcagctctacggacgcccccgagaagctcaagacggctctgggttcggaagtttcgcgcgcgtactcctctgttggagctatccacgcctacttccagaagaaatatggttttgctgctgactgcaaggtgatcccgttctccggtgacaacccgtgcactctcgcgggcattggtctctctcagcccggtgatgtgggtgtctcgctggggacgtccagcacactctttgcggttgtgccaacggaggccgcgcgcttctcgggacaagaaggccacttcttctgcaacccgatcgacccggacactgtcatggccatgatctgcttcaagaacggctcgctcacgcgccaagaagtccgcgaccgccgcgctggtgcgtcgtgggagaagttcgaggagctgatgcacgtcaccaaggcgggcaacggaggcaccacggcgttttactaccaagacccggaaatcacgccctcgactctcaaggctggagttgtcggcttcgatgccagcagtgctcgcaccgacatctcgctggccccgcctgaagtggaggtgcgtgcggtcgtggagagccaattcctgtcgctgcgtctgcacgccgaacgacttggagtgaacaagccgcagcgtctgattgtggtcggcggagcctccgcgaacaagtgcatgctgcaagtgctcgcgaacgtcttcaacgcccccgtgtaccgcctcacctgcgcgtccaactcggctgcgctgggtggcgccttccgggcccgtcacgggtacgcctgtgccagcaatgcctctggttacgtgccgttcgacgtggccgacagtctcgacttctcgctgagcgccacgcccatcgaccaggacgccaagacgtacacggccgagctcccgcgcttcgaaagcctcgagaaccaggccgtcagcctgctcagctaggcaggcaactgctgtgtgtagctcctgtccagggagctctttatctttcttcgcactgcgattcatgtgcagctctagcgtatcaaccaaactaaccaaatgcaactttgccgtcgtcagatgatcgtcatcaccaaggcaaacggcaacgtggtgggtcatccctcctctgcctcgaatagtgcgccgcgtgacgtcgcctcagaactcccaaaccctgtcaaaccgcattgaagttggcgacaaagccaagcgaaaccggtactgaaccggtgctagaaatgcgcaatgtcttgacttcattaagcaaaatgcgatgcgcattttttcacgtacatcatcaaaacatttaccgtgatgcagacgaaaagccgtgagcaaaaacggggcggacttggacacctggattggagagctctccaagctcaaggtcaagctcaaggtggcgctttggcagtccctgaatagccccgctccgtgcaagtgcaagcgctgcctgaactcgatgccaatgtccctgctgaccccgtcccgccgtgccctgacgcgccgcctcctgcgctgcgccccgctggcccgcgcgctgcacgccgccccgccgctcgcccaggcgcaagaggaggaggacgacgcgctgcccgtgctcgaaacggcgcagatgaacatgttcacggccatcaacgacgccatgcgcgtggccatggagacggacccctccgccgtgctcttcggcgaggacgtggccttcggcggcgtgttccgctgctccgtggacctgcgcgagaagttcggcagcgaccgcgtcttcaactcgccgctgtgcgagcaggccatcgcgggcttcgccatcggctacgcgtccacggggcgcacggccatcgccgagatccagttcgccgactacatcttcccggccttcgaccagatcgtgaacgaggccgccaagttccgctaccgctcgggcaacgagttcaactgcggcaaactcaccttccgagccccgtacggagcggtgggccacggaggccactaccactcgcagtcgcccgaagcgtacttcgcgcacacgcccggactcaaggtggtggtgccacgcaaccctgcggcggccaagggcttgctgctggcgtcgattcgggacccgaacccggtgctcttcctggagcccaaggcgctgtaccgcgcatcagtcggagaggtgcgttgcatgtttttggacaatgagtgcatggtgataactgctaacagttgctggtgtgcttgctgtaggtgccggtgggagattatgtgcagaacttgagtgaggccgagatcgtgcggcgaggcaccgacgtcactgtagttggctggggcgcgcaaatgcgggtgcttgaagaggcctgctcgtatgctgaggatgtgggcatcagctgcgagctcattgacttgcagaccattttcccctgggacgctgacactatcgagcactcggtgcgcaagaccggccggctagtcatcagccacgaagctccggtatgttgctgcaaaagtaattttcttgctggtttggcgttgatgctgacgacattttttttctattgctttcagaaatccggtggtttcgccgccgaaatctcgtctagtatgcaggagcggtgcttcctgagtttggaggctcccatccagcgcgtgtgtggctatgacacaccgttcccgctggcgtatgagtcggtgagttccccctccatagctttagtttatcgtttccaagtatctttcgctcacaatttctatccttttgttttttatcagcactatcttccggatgcactgcgcaacttcgaggcgatcaagaaagtggtgaactactaggccgtccatccatctcggatcatacactcaatacttccaacgttcgtcatgtgtaccatcaaacttgaattttagttcgcatactgcttctgaaccttttgcgcctctggctgcagtagactctcatagtactggcaaaatagttgcgtctgcgtgaactcgtccaaataatcctcgtacatgctgttgcgcacctccttggccacttcttcctgcaaccggtcatagaaactctgtcctcctggagaagataacaaaagtgatcagccagatattaaacaccttcatgcgcttggcgcctacctgaaatcgaagccgccaagtcctgcgaagaaatgtcgaagcccatatcacgtaggaaaatctccgcctcctgcatcgtcagcgtaatgatcgtgtcttgctcgtcggagagctcgtaccatggtttccccgtgggacgcagagcgcaaaatcgttccttcgctttccgaaggaggcggcacagttctacaccattcgggatggaagtgggacccaaatgcctcgtcacagctggcaccgcgatgcgatctctgtcgatgtcgtaaaagcacacatcggaccattccgaggtttcgttgagcgagtggcatccagcgaggaacggcacgggggaatggaggaagtccagtagccctgatggcaataacgggatgtatgtcgattgccactggaacggagcgagcagaagcaaaagtgccgtgcagaccgcagatactttggcggggctgtcacccatgatcacaacctgcttctccagcagcaagtaggccataatttccaccactttgtccggcgtcaggaatcgtaacacgacaccaatcgcccatcgatccgaatggcgcttcggaaactggtaactaaagtcgtacgatggaaatcgagtggtcgaccaatgcccaggatcgctgatcttgaatcgacgtgctcgatgtaaaatctacaatagatagtgacaagcaagttacgggttagtaggtgattgagcggcctacgatggtatgtaagaaaaggaacgcacgtcgatagaagaggctgataagcaccgccggtacttcgatcgtttggtcggagattttggtgctgtcgaggagtgaggtcttcgaaaacgcaaacgcattggtctatttcctttttcaagcagtgtcatcgtttgctcgaaggtcattgatgctgcaagaatcaagaagcagcaagttaaaaaggggttccgaatcaaggatacaagcaactccgcacctgtcgcgatactgtcgactgcttccaaaatgtcgccaacgataacccgatcatattcctttggtcgagtagcgtcaatgctcttcaccatgggtttatccataatccacgcgttagtcccgttgtagttgccgatgtcgtcggtgctgagacttttccgaagctggcttgggcgtcttctcgtctcattattcgcctgagtgtcttcttttttgctcaggctaatgttcgtatcctcgcttagtaccgcacgttgctcagctgaagacacgttcagttttgaagcaattgaagccaggttgggttgatcggtcgtctccacatcatttggtcgatctcgtaagcgcggattttcttcgtgataaatcgtgaattccattgcgagatccagcaacggccttaagacaatttcaaattgctcgtcttcgctggcttcagcccctggttcgttggttgacattttctgctgttctgtttcgttttcaatgatcgcccgtagtacctaaaccatcatttacaccagattagatatgcgcttgacagcaaaatagagaaatcatgccccagaagagaatcttaccgcaaaatggaagcggtagaacgggaatttgctggtgaagcagtagcatacaggtgccattttgctcgtcatggccgaccgattccctttgctagatggtgacgaggagttcccactaagccagctgggagtccagctcgaacgagggctcttcggtgctgcgacgctactggatgcgctttctgtcgttgttacatccttcatcactgcaacacaaaatccatacagcacttcgcccttcgcaccggtaagacgaaaagtatagccactggtttcaggggcctccttgatatgcttctggaggggctcgatctcggtgaaccacttggacactgctacgcctcggatagacgccgcttgctcgggggtacacatcatcagaggtacaccacgtggaaaacaaaagtcggcgacggattcatcaggagggtcattaattcgctgtcatagcaacagaaacacaaagtcaatgagaaagcatcagaaaatatcacggccgatagtacccacgtacgttcgggtagtcaaagagtagtttaggtttccagtagccagcgagcccagacggttgatgctgtcgttccgtctcgctgagagccatgcccgtaacgaaaaaccgttcgaagatgtgctccttcttgaggtgcatggaaaacatgattgaacgcgccacattctgcagcttgtgcgggtgggctcgcgcgtgccaaatatcgcgcgatgacggcttagcatacatgatgcggtacatgaggtgttgctgctgtgagtggtcaccgtcgactccgttcttcccgtccatcattcgctgcgacgatccaccaaccgcctccagtgcagaacctgtagttgacgaccggttcactcttcccggggctcctacagcattaagatgatacatgagcgactgccggtctcgcagctccagtgcaatcgacgggttgaacggttcgcttcggtcactggttcgagtcgggcggcgtatcgtctccggcttggcatcttctccttctgtcacaacttccgactcatttctcgtcgcatccacaagtggcggcggcgtgcccggagcttggccgcaactgtcgtcactgtcatcttcactggaatcgtcatcaaagtcgaaagacgacagcgtcggactcaacagattggccgtgtggtctggactactgcttacaattggcaaggagagctcaaaccaacgtcaaaacactgacttaaccccctccttatagcattgcaacctcacctgaagaaggacgaggttctctccaccgttgcagcgccggttgggtcgccgtctccgtttgggagtcgctcggcgcgcactacgaggtccagaaggtccctagccgtcttctgccgacgccgcttctccaccaggtacttctccttccacttctgcgcctcgtactgcgccagcaccagctcgttctacctcaaacagcagcagcgagtcagcacagaaacacacaaaatataaggaggggaagagcggtcgtctctgagcgggctaagcgccgtagaggctgttgcgtgggggtcacacagccctgtagagtctgcggaagtggacgcacctgcagctgctcgaacttctcctgccacgcgtgggcggcggcgctctccgcgctgaagccagagctcatcgatggggactcgtcggcggctgtgcaagacgattttatttggtgatttgtatggactcagatttccaataaaatacagttgaagagcatacttgcgctcttagagacgggtgcacttcaacttcaacgttgttccctctttttttttcattgacccgacacggcaacaacagcgctacggcagctcagctacccggttccaacaaataaatcacgcggactgctggtggccgccctccttcctaccaatacttaataatcaaaatcatcatcggctcgacgccgcatgcacgctacataatggcacagctggactgctcggcatcctccatttcagtatcctggtcagcaggagccgtcgcgccaccagctttcagactcttttccatctgcaaattagcaaagacaacgaggtaagcacaataatcaaaacgacatgaaccgagagaatacacttgacgtaccaggtcttgggtgaaaaggaaggagctgcccacggagaacttgtcgccgttgtcatactgcatcaggtacatgtcgttgtccagctgcttgagcaccacaccgcggacaaactgcgtgcagctttcgcccacggtaatcttcgagtataggatcgatcccacggaaaactcgtggcgctgtttgcgcggctcaggtacttcaggaaacgtagagggcactctggtctcgttgctcgcggttgccgcagcattagcccagctattcgagcccggctgcgtcgctggctcgctgctaggctcgcttggtgccttgggggaactggagctactcttgacctcatttggcgcgacaatcgccgaaatcgccgtcctgtacggcgtgaccgcttcaatgtggctgtttgtgaatgctggcaccgtaaatgccgggatgacctgctcgtccatgttatttgtcaccgtaacaaacaccggagatgaggactgttggaggggctcgaccgccacgacgccccctgccgctagctcaatagttgtgacaaacttcttcataacatcccgcatcgacccgctcagctccaaccataacgccttgaactcgcgaatcagtacaaggcgcaccgactcaggtagcaccgactgcttgtcctcccataactgctgctgaccctctgcaatctccatgatcacttgcgtggagctctgcgtcacgccaatgaattcgcgaatacgacgctcaatgtcgcccttcttgattggtgcagagtcgccaaaatactcgttgtgggctgcgagcgccttctcctgttcttgcaattcctccttggccttggactgttggatcgagtggaattcgtagtagcggcaaagcgcacgcgccagcatcgggataaacgtttccaacgccgctgtcgcgcgggccatcgaagccgtgcgcgcttcctgatacgacttgcaggagttcttcagtgcttcttcacgtcgctcacgaacctttcggaacagaatgctcaagttcttgtgaaaagccaacgcatgattggcaacctgcaacgcctgcgccgacttcttcacgcgctgttcactctcactacgagatgtccagagtgcctgcacctcgacgtcgtctcgcttccagacttcaaccacagactggaggctcgccgaagcttctgtctccccttcagcgatgagttcttcatggcgcttctttacaaacactagaatttgcttcgatcgagtttccttcgtctgcttggcttctaccaacgtcccctccgcttccttcacgtcacgaatgctcttgtccgacaacgcagcaagcttctggtgtagcgtctcaagtgcgccctccacttccgtgctgtctttgctgttcctctcatttgtctggttgaaccagttcagccgatccatgtacgccttgcaggccgatgacagacactcgatggcactcttcgcagcattggcgcgtgcataagcactcagctcagccatctgggtttctgtttgcaccaaagctgcaacctcttcgtctttcttcgacaacacctcatctttcggcgagcacgccaccgagtcagtcgcattggctacatttggaggcaagctggccgcaacctcaacggtcagcactgcacccctcgtccgaatatcctgcgcgtcctgcgtgccaacatccttcacccaggtggccaaagcgtccactgtcaagttgagatgcatgaccagctccagcgtatcagagacctgcagagttgtccacacgtcattcgcccagtccgggttgcgcagcggctggagaccagccacacgatcttccacggtctgcagcagcaactgctgcgctctggcacagtccgcaccagtgggggccatctccgagtcctgctgggtgtccagcgtcgcgtccttatcgtgtgtgtgcgtctcctcttctccctcgctcttctcctctgcgtccatgagcgcaaagctgttgtgctccttgcgcctcttgctgggcgtcacattcgcgtccaccgacgacgcgctcatgcgccgcttctcgcgctcgcgctccggggtccccatgctgctggttgtggctggcggcgccgacgctgggatcgaaatggcgcgttggtggcggcggctcaccttgaggtattggtaggcgtcttccgtgcggttgtcgcaggcgtgcagcgctcccaccagctcctgactcgtcagcggcggctcgaattcgtacatggcgagcacgcgcagctgctccagctcgcgcagactcggcgcgtcttggcgaggcttctcccagtacgagtcgtacgtggtgcctgttcccatgattctcgcaccccaagaaaagagcgaatggggtccagtgggaatatttgcatttgaaaagctcacaaagtgtgagaggaagagagaaaaatgacggtagtgattacaaaaatgacgcaaagtgacctatcgttagtatgcggcttcctcctcccccgcgtcgtcttctttctcgagctgatgggaaatgactgctgccacgccccacttgtcgtcgagcggatctttctcgagctgtaggatggtgtactgacccaaccgtaatgaacctgataccatcgagtcaattaacttcagtcacttaagtctccgctcgctcatacccagccagttgcaccatagacgcacctggatagatcaacggaagctgcgcgtgcgggtgctggtcgctgccaccgataatttcaatcgcccgaggctcctctggcttgttggactgcagcatcggcagcaaaccggcgaagaaggagctctccaccacgggcagtcgggtcttgaccgccgagtcgcgcagcaccagcaccatgtcacgatcctgcatggggtttttgccgtcgttcaccaatctgtcagcaagcaacagcagcagcagcggaactggttttagtcaactcttcatccatcacgccaagtacatgagtcagcgttacttgaaatatcgcgcttcgcccatgacagccacgccttcaacgagctggtcctctcggcagtacacattggacgagtactgggtcagcgacggcgccgacgcgacgatgctgcgcgtcgtgggcgggtcgttctgctccaccgtaagcaacacacacaagcacagccacccatcagctcctgggattgatccacgcaaccagacagcgcgcgcacgtcgtccgggatgtatagcacgcggcagatgatcatctcgagacgcgagatgagcgccatcatgtctccttcggcggccgccacggcctcgagcgcctcgtagtcgtgctgcccgcgcttggccaccaggccgccggtcacgagcacggcatccacgtcgcagtcctcggagctcacgatctcctcgcagagctggttcacgcgcgcggtctgtccctcgaggtcgctcagcagcagcagcttgagcttggtgggcatggtcatcgtccagagcaattgggatcagctcggcgaatttgatggtgtgtaccatcataatggtacacaccatagagatagcttggccaacgtcgagtcgaagtgagcctgagtattaatactcaggctcagccttggcgctgccagccacgggcgcgtgcgccgaacggaagccggattaacccgcgctagttcttgatgagctgcacatgttactgcgccgcctatcgaccaacagaaaccagcgccaagttctcgccaactgttgggccaacgcagcgcaccggagcgtttcacgggcgaaaccaatcggtgaccgccactatcagctatcaacttagtcaaaacggctgctccatcgcattgccgacgcccgtgaccaaaagaaaccaactccaacaccaacacctttcagcatagcaacagcttcaacgtgctgttgtaacgttttgctgtgtgaagcgacggcggtacaacgattcacttggttttcgtatggtgcgaatcatgaaaactcgtcccagttcgttctttttcacataaatcgtgtcacaaatttcataaaaacgttctattttccccttttgcgtgtcgttcgaccgttagtttcggcttcgccatgcgatggggagagcagaaccgggaaggggcacagcgtcccccacgctccattcctccatttcacgcgtccgcgcgcgagctccttcgcttccggttcctgcaccactggccatgaacgccgcgcagtacctgctggaccgcatgcgcacgtgcaaggcgctgcacgagatcggcgacaagaaggcgcgcggctgcttccagtccgtgggcagcgccacgcactcgttccacggcgacgacgcagtcggcttcggcccgggctacatggtggtggcggacggcgtgtccggcaccatgaaggcgtccggcgtgctggccaggatgctggtggccgagacgctcacgcacctggccaagctgcgcaagcgctcgagggaggagccgccctgcgccgaggacttcagccagagcatgcaggcggccatcaagagcgcgcgcaagatggccaagcgcaaggggagactcgactcgacgatctcggctgtttatttcgacgaggtctcgcgccagatgttcgtctacacgatcggcgactgcaagtgcgtcgtgttccgcggcgacgcgctcgtgttcgagagcgactccatcatctacgactttaacgtgccggccgtggtgtccagcaaccagtctatcaactacgcggcggaggtgcagatccaggtatttgagtatgaagagggtgacgtgtgtctgctcttctcggacggcgtgcacgacaatatatacgttgacgacattgtgtcgtgcgtcgcgtcggcttcgacgtcgccgtcgtctcgatcgaagggcggcgcggcggaggagatcgcccgcaggacagtgcagcgcgccaaggacaccttcgcgtgcagctcgcagtacatcccattcgccgtttcagccgcgggcttctgccgcgaggcgttggccgagctcgagaacagcaaaaccgtcgacgcggaggagttcgagcggttccgacagaagtgcgaagccatcccatctctagaaatccagcgcgccgccttcaccaaagagcggcgcgtgcgccagctagcgttctacagcgcgtccaacctgctcgccttcgcacacaagaagcagggcaagcgtgacgacatctccgtgtgtgcagcagttctcgcgtgactatgctccattggcaggcatcattctccttttaccacgcagtatggtacgaaatcccccaacaacgacactccgtgtggggactaccttcgccgcatacagacagaaaccaaaccatagtatatgactattaaactagtaacacagatatattagccacagtacaattggtctcaggtgcttcatcggtgcttgtagctatgcgatcattctaaggagtcatcggtgaagtaagccagccacttggtagacgaaaagtgagtcaatgcctttgactcttaaggtggtgacaagcacgtacaaagtgcgaacttatcagtcatagtgcgaacttactgctgtccagtgatggaagctggcagtgcgtcattcagcaagttttcgagaccatgggcaagcgatcgcgcaacggacgaggcggaggccgcggtggcggccgcggcagcaagaagccgcgcgccgatggcaaggcggaggactggcgcgccgacaagttcgcagactgggtgtacgagaacgagaacttcgacgcgtactacaaggcgcagaacatcatggcggacgcggactgggccgcgttcaagaaggcactggccacgccgctgcccacgaccttccgcatcaacagctcgtgcccgttcgctgaccggtgagttcatcagtgtatattgcagtggaatttcgagtgtgggggctcgttttgagtgattttggtgctttggtgcagtatccgcgagcacattgagcaggacttcaagttcgacggcctggtggtggacgatgagcccgtggagcccatcagccccatgccctggtacccggacaaccgcggcttcacgtggtcggtggagcgtcgtcgtgtgcgcaagctgccgatcctcaaggagttccagtcgtggctcgtggagctctccaacagcggcagcatcacgcgtcaggaggctgtgagcatgatcccgcctcttgtgctgggcgtggagtcgcaccacaaggtgctggacatgtgcgctgcccccggctccaaaacgtcgcagttgctcgagtcgctgcactcgaaggagttcgagacgggcaagacccccactggtgtggtggtggcgaacgatgtggacctcaagcgcgcctacatgctggtgcaccagtccaagcgcatcagctcgccggccctgcttgtcacctgccacgaggctcagaacatcccgttccttggcgaggacggcacggagcgtgacggtgtttttgaccgtatcctgtgtgacgcgccgtgcagtggtgatggcactctgcgtaagaacccgctcatctggaagaactggagcgccaagaacggtatcgcgctgcacccgcttcagctgcagattgccaagcgtggcgccgccttgctcaaggttggtggcaacatgtgctactcgacgtgcacgttcaacccgctggagaacgaggcggtggtggccgatcttctgcgttggggtaagggctcgctggagttggtggacgtgtcgaacacgctgccgctgttgaagcgccgtcctggtatcaacacctggaaggtgatggattcgaagctcacggagtttgcgtcgtacgaggactacgttgcccaggacgaaaaggagaagaccaaagacaagatccgtgctactatgttcccgcctacggctgaggaagcggagaatctgcacctggagcgttgcatgcgctgcctgcctcaggacgagaacacgggcggatttttcatctgtctgctgaagaaggtggcgccgaccccggatgagaaggaagaggctactgaagttaaggctgatgatgtgccgatgaagtccgaagagaccgcggaacagaaggaggaaacggcaccgtcgagcgatgctgcggatgttgacaccaaggttgacgcggaggctcagaagtctgcgtctgacgaggccagtgctgaggaggctaagccgcgtaagaaccgtcgcgacgaccgccgtaacaagaagggcgaggtgtacgtggcgtttggagccgacaactggaccaacgttcgcgagtactacgacattgcccctgagttctcggcatcgcagctgatcacgcgttcggaggacgcaaagtccgtcacgtttgtgaccgagagcattacgatggcgttgctcgaggaaatgaagcgcaagaagctcaaggttgtgtacgccggactcaagatgtttgagcgcaacgagactaccgagggcggcaaggtgtaccgtgtgtgccaggccggtctgccgcacattctgccgttcatgaacaagcgcaaggcgaaggtgtcgacgaaggacttccagatgatgctggagcgacttggtgatctgctggacttcgacgagttcgagccggccactcgccagtatttccaggacgctccgattggtagcgtcgtgtgcatgcttgaccgtccgggccagaccaacgtcgagtacgttgccctacttgcattggccagtgtctggttgcttgaagcaaatgtctgctaaactaactattttgtgtttgctggttctacaggtcgaaggtgatgaacctggtggtgtggcgtggccgtaactcggttaatgtgatggcagccaaggcggacgtggccgtgcttttgggaacgatgaaggagatgaagatctacgatccggcagtgcaggaagcagtgttggaagccaagaaggttaaggacgcggagcgtgccactcgggacgagcagcagcaagaaggcgacaagccggaggagagcgacaagaaggcggaggaggccgacgctacccccgccgtttagagtcatgtgctagcaaggaatccttttctctttgatagacaactgctgctctaacagtttggcagtgtacgtgtccgatttgcacagaagcgtttcagaaaagtatctgctaatcttgggggccttgtcaaggtgagcaggaatagcaagcaagcacgatcgtgccttgccctcctcctcgttcttctctggtagtttatttctgctcgcggctcggcaagatcgccatcttgggttgagtatttatttgtcgccaaaaacgctgggcttggagcagtttgaccccgtaggcgtacgatggaccgcaattcgtcggctgagatgcttcggttgccagatcaccttgatacgccgacgttcacatggtacggagcttgtgtctgtaatacggtacggatagcatctctaactccgagtttgttttgtttgtctgtgcagtgaggtgtgcaaaatctcagtgcgctccgcacaaaagttgatggaccacgtgaacttttcgccactgcaccaagcctcactgggtctgggtaaaagctcaaactccggtgacaccaaatcgcgtcccatgcgtcgtctgctgtacgacggatccaagttgttctggcgcgtcaatgagacccttgatctctgcatctacgaagacatgacagcgaactgcgtcaccatccgagctttcccgcagaagacacctcagtcctccgaatgtgatgcgaagaaaagctcggtcggctccattccggcattggatgtggactcgcgtcgcctgcgtcagactctcgggattgaagcagcaccaaaggctcctggtcttttcggaagaatggcttaccctcctccgacaacgatgtcaagcatcacacttgctaacaagtcgaaggctggcaccacgtcgtcgaccccggaacattcgggcgagatcatcaccaagtatttgctggctcggttgcaggcacgtcgcgactcgcacgaccgtgtgcacctcgtcctgcaaatgataaacgatgacgacgtggatccagccgacttgttgctggccaccaccgaaagctcgcaagctctgcctaccgacctcgcaatccgtcgtcgccacactattgatgacgtgaaggacgcgcaaaaagaggtttccgtggcagccactcgactcaagaacgcccgcatgaaagccgaggagctgtcgaatctagcgcggatgacgttagatgctttctcacgggaccacagctcaaacgaccctgtggcttcgagaatggtcactcgcgagcaagccaatgtcgcgacactggcgtcttccgcgtccaacacgattctgggcttgggtgggggtcgacgcttcagtgttatgagcaacaaacccgcagctacctggatgcgcgcttacgatcgtgtggtgcttcaaaacgccgtggagcgcagtaaagaagtgattgagcaccttcctcactacgacgagaaaatggggccgattgacgagtcgaagtagaacctatcttgcagggataatccttttcttaattcacatcatgccatgattgaaactacagcttcatctgttgttcatgccttctacatgtacatcaggtacttacacgttaggaaagatattcatgacagcttcactttgactcaattgataaacaagctttggtatttattttccttgcgttgtcgagtacatgtatactacttaagtatttgtagctatgacggaagattcttccgcgggtcatcccaggttgtaacacggttgatgtggtcgatgaagaatactcggcccttggcgtcagtcttctcctcccacccgacaggaagtggatcgatacttgtcgagtttccagctgagttcctcggtgacatgtccgtcgtagcgtcttccttctgctgggcgatgtaccgcagtagcgcttcacaatagagatcacgcgcttcttggttggagaagtccaaccttcctgtggacttccaaggcatcgaatcgtgctcagttcgtggcgtctcggatggtagtctcttgctcatggtcaagacgttaggaggcttgggactggaaccatgacagtacagcattagtgctgctcttgatcattcatttcgcagtatcgaagacgagtacttactctcgaatgcggatggttgtgcccggtgagatcttctgtgtcttagggtgcatggctggaaagtttgttgtcgcggtggttgcatgcagtcggtcattttcctggtggggatcgccatgggaaaacattagaaatgagggggatcactgcgagctattgccgacacgtactcggttgtggtagtctgtgatccgtcgattcatgtgagcgattcgaacttcatgagcagctctctcttcgcgcatccgcctagcaaacgtgctcaatgcttcgctacgtgtcttcctacaaaagccacacccgttagtctcgttcttttcgcctctttatttgaagacggtgcttacgttgggctgccatcctggagctcgtcgactatagtttagatagatttcacggaatcacgagtggggtcaattgaagggcggccaccaagtccatccgaagtctgggagtgcccacctttctcgccgcagtcgaccccagcagcagtgtacgctacgacgtgcttgaagcggcgaagctctgcctgcgtttgaaatcttccgccagcgttgcgctcgtcgaaagcacaaaagcctgcatgcgtggcgcggttcatgatcctctcttgtgctggaaaggtagtggtccttccacgcctgaagacaagaattacccggaaggatatcgacgtgcgctaagataagagcgccgagctcgtctccgccccgcattccactaaaaatactacgtacgttcgatgatccgaagacgtaagctgcattatgctgcgggcgcgacggcaatccactatgcacggcaagctgcgcgctagagaaaacgataatgatcctgcaatggttctcacgaaccccttcgatttggcactgtacacacctcaatacaagcaaccagactcgccagccaagaatttccatgacggtgacgctgcgtggacgaggtttcttgctgcgaggccgttgttctatcttcccgatcggtctgctatcacggatgaagacccgatcaatcgtcaccggcgcctgtggacccatcatgagctccaaacgtttggagatgtagtagaagaatggacctgcgctcaactgcgcgcccaagagcgcacactacgccgatggcaccagtcagcgacccacgtacagcgctgcttccgcggtatgctcgacagaatgtacgtgctgagactgcggcaagagctgttcgagtatgctgcaacactcgagagggccatggagcttgctcgtgaacgacggaggcgacggaaggctgctgttgcaatccagagaggataccggtgtcatcggaagcttgtcatccgtcaacagcgagcagcagtcgtgctgcaaaatgcaagcaagcgcttcatgcaacgactaagacgatggaatgcccgagtgacgatgcagcgcgctgctcggttttttctgtggcgagttcgatggcaacgatacaggcagcgcgtgagaaaaatgctcgatgctgcagcaagacaacgaaaactcgctctggcaacgaaagccttcctcaacgcacgagaaaatgccctgcatcaacgccaagtaaaaacctgggctgatcatccagaacgaatgcaaatgttgttgcgggcacgccaacgacagcaaaagttgcgactggcaaccggtagcacccttcctcctctactacgttcttctaaacaactcaacagtccagcaaaagccacgtatagtattaggtcgttctcgacttcaaacaaacaccaaccgactctacctctgatttctccttctagccgcggtgaataattgcaacatctaggaagccgattgagtaaataaagctgaagtaaattaacagctacgtggacgcatcatgttaatgatctgtatacatgcagcacaactaagccaacgattcaactcacgtgtacagttattactgcagcgacaagcctgagcgcagatttgcgcacacacgagcaacagcggcggtaacaggacatcctggtcgtccattgtcttcggtcacagtctcgaaacgtttgatagtcatgtcaagcaccgctggtggtagccagttgcgatggaccagccaaaacgcttcaaagttcttgctgaaactcagcaactcgcgttgatgctcgtcttcagggctcgctgcagcaattcctcttctctcttcaaatacatttccgcagacagtccggagaccctcacagaaagtattcaggtagatgagcatgtcgcttccaagagaatttaacagctcttcaggcgtcctcgtcatctgctgctgctgctcttgtgcacggcaatccattaattgggcaattgtaaaagtgagagtctgcgcggctcggaagaacacacggcgcaggtccgcttcctgtgcttgacgcactagcgcgtttcgggagcgcttgcttccctcaaagtgcttctgaacatcagcagtcaaacggaaggtttcgtcgaaaatcctccacgtgcgctcggtctcctcaatgcattcaggttctaatctgctgcggcagcactccataactttagcccactcctccgccgcagtatccattacgaattcgtactcttgcttgtcttcctggagctgcccgacctcttcactgcacgcttcaattattatctccaagtgtgcaatcgtatcatttagtgcacgctccctgccgatgttcgtcctcgaacactcctcgaccatcagccgccacttctccatcatctggcgcagctcacgcagcacagcctgctgcccacgcacgcccggctccatcttcacctgctcagtcgctcgctgtctgctcgaccgtctccgtactaagctcagcacctcgcagagcacccagaccaagtctttgttcgcttggtaccgtcggtcatggcctctggagaacgccaggaggtcgaccagtttttcgcacgcgaggcgaagagcgcggttgacgtcggcggacgccggaagaccagcatcttgcagcaacgctgcgactgcttgctggtccactcgcagctcgcggtgcttggccagcagcaggagcttctcggccacgtcgggccacggcagcagcggaatccacggcgcgtcctcgctcgagctttcgccctcatcgtcgctaatgacgatcacttcgtggtccgcagacgcaggcggcaacggcgcagcgctctccatagttccgctactgaggcttggtatgcccgttgacatttggctcaacttcaatcaaaccagatcatttatcgacttgcacagggtggcactaaatacgccttgtcgcatgtcacactatcggggtaaccgaaccgtccgttccccggtccgaaccgtcgagccagtggccgctcccagagaagggagaaaagacgcgagaaaccaccccccatacattctcaaagaagccatcgagaaagaactcttctctactaagtaaagcgagcgagccatcagcgggctgggagttattccgctttctgcaatcctcccctcgaccgacgcagtgtcatccatcggcgcccccccccctccgtagtgtccccgccgagcgatcgagcgtctgattcctttgcattccgactcgcccgcctctcagtgtcagtgtcggccgtctgtcgtcccgttacacgtcgctcgctgtccgtccgtccgcttctcggcgcagtttttggtcttgcgtcgacgcactgtcgggccctgaactctaccgccaacccaacacattgctcaaggtaaatatttcaagctaggatttctttagtagagttaggcacgagatagctgccgtgccgtgctgcattgacgcatgcacacaccactggcattgcaccacgcactcctcgcacctctccgacgtcgtgtctctcccgccctttacgggcgcgttgaagctctttttgcggccattgtcgctttcagtgttttctttatgaaagaagaaacatgggcctgtttaagggctttttctggtgctaaaggtgacgccatgactgaggtcttgacgcctcgagagctcacccagccgatcccatgatggagagcgatcttcaactcgactgtgacgtgtcggtggttgctggtgctggtgatggttgagatggagtgcaagtatggcgcctggcgtcggcagcactgcgtcttgtgtctaaggaagacgtggagatgatacagagtgactcacttgtgcactgtgtgcaacctgtctggattgtagaccatgaacgtcaacatggagcgagccagcttcacgagcctgctggagcactcgcagttcggtgctccgctgcaagtcccgcagcagccgctgatgcacccaagccacgcacaagctcagccggcgttcggactccaaggcatggtgtcccaaccgatgtcgatgggtgcgccgcagttcaagcagcaaccagctcctgctccggtgaagctccccgcagaccagtcggtgagttggcagtgtagacattgtggtatcttttgtagactcgagttctcactatttatcattcgacgtcttgtttcactgctgtaggtcccgaacgtgcttcagaacatgatgagccgcagcaatagctccaagctcactccgtccagcgcggaggcctctttgctgtcgcttgtggatggtgagcttcgcgtgtcttcaatctcaaacctcccggtgttcctcaagattctgcctcgctgcaagacggagcctgaacaaactctagcactcgtggtgctgcgtgccacctccaccgccagcgacgccaagctgtctcacgcttgtgctggtgccttcgagaagagtggcggcctgcgccttgcgcgcgcctgggtcgattcggcagtggcttggcaacacaatgacttgctggttctactgttagaagtcttgcagactctaccgttgcaattaactagtattacggaagcacgtatcaatgagcctatcgtcaagttgcgcaagaacgctcgtgaagagcgggtcaagcgcgcagctcaggatcttctcaagttctggcgtagcaagtttacagagaaggagaagccggcggcgccctcgtcggtagccaaagagaagacgcccgactcttccagcagctcgaacaagccgtcctcatcaacgacagcctcttctgcaaagccagcgccttcgactgcctctagctcagctcctgccaagccggtgccagctaagcagcctaaggtattgaagaagcgtactatcaagcggttagagcggcttcctttcggcggcggcagtgcggtgtcgaagtccagcgacttgattggaaatctcatgcagcgcaagtcagctaaggacgccgccgctgcagcggagaagaagaagactacggcgtcggccagcagtacgagcgatggcaaggtggatgactcgcagtctgcaagcgagggctccacttccgcctcgagcagcgtggacgatgcgttgtccatgccccttcccacgattcaaagcttcaaggccgcatcatcttcgacttcttcctcaaaagaacgcaagcgcattcggtgggcggacgagagcggcgaggagcttatcaaggtgaagctgatcgagtcgtggcgcgatcttgtgccctacgacccgcggcacgatgaccagagcttcaaggacgccaagctccgtgagcacgccaacgagcggcatgcgatgctcgctcagcatcacaaggtgccaccagctgtagcagcttcaaagtcgcgcgagtggactactccagcatttattcgtctgccggaagctgtggcagcgcgtgtcgacagcaagaccgatgagatgcatgtccaggacagccgtcggcgtcatgtggacgagtatgaagtgttagccggtgagatgccgatcccgagtccgaaggagtgggaacgcgtcaacgagccccaccgcggaccgcctctagagattccgctgagcgatgtggtcgaaggtgacccttgcgctgctgctatgatggccccgcctacctcgtcggccccgcctacctcgtcggccccgcctgactactctcgagaggggtatccttctggagggtacgaccaggccccaggctatgatcagcgtggttacgacaaccgcagcgagtacaatggtcggcaagaccccgaggcggatcgcaagctgcgtgaagccttgggtcctctgcaggagaacacggtcgctcttttgctcgacaaccccgacgtggtgccgcaggtgctagaggaggcgcagcgccatggcaaccgcattccagatgctcgtgtgtttgaaattgtggatcagtatcgtcgcggtcgctaccaagccccgcccaatgctggtgggcccccacctgcgtttagtccttacggtagtcagcagcagcagcagtatggcgatatgggtcctggtgcgggctatgatcaccagtaccagcagcagtacccgcctcagcaaggcccgccaggagggccctttatgcctggaaagcggaaggcagacgccatgggcgcttcgcacaacggccctatgctcgacgctccgcagtccaagcggccatcaaagaagaaccgcggcacgctgccctgcaggtactttgcctcgccgatgggttgcaagcacggtggcaactgccactacgcgcatgttcagccggcgcctgctaacggccccgagttcgagagtatttataacagccaaaatggtcccatgatgggaggacgaggcgcaggacccatgatgggcggccgaggagctggtccgatggagagatatggccctgcgggcatgcagcagccgggtcaccacatgcgtggaggacgatgatgaaaacttgggaataaaagcaaagtctcgatctcgatgtgggcagagaagaagccagcccagcccaacgatggtgctcatgctttgccctttgaagaagaatacacacgtcggaagacgctttcagtatcgacgcaactcgcttttggtaactcagttcgccgaagcacttgcttcgaccagctcgtaagttacttttagttcataacttctctttcaagaatgcacatgatacacatgaaatgacaagcgttttgcctcgaagtttacaatatcaagccattgacaaccttgacgatcaagtaacgaataagataaaatacagatggaaaggaagtttgtttgccaaatggagcattgtgtattgccttttgtcctgttcgttattcgaacccacaccttgccaagaaagcagggcgcggggaacaacacgtattgcagaggagagatgccccaggaccgtccacctttcaataggtgaggctgagcccagggctccgagcccgctagcgtgttgcagcttacgccttgaccgacgaggccttgcggctgctgcgacgcttggcgatctcgctggcacgacggtccttctgctccttcacgcgctgcagtgccataaggcgaaaaaggagcaggatagttccaacatccgcgcatacaataagtcagtatcatggcgtacaataactacacagacgtcacaatagaggaatgagacgaacctgagcgtggaggcggttgtactcggcggcctcgcgctgcaccttctcgcgctgctgcaccttcttgagggcgatctggcgcttgtggtggagcgtgcgcggggtcacaagacgctggatcttgggggccttgtcgttcttcttgcccgtcttggagtcgaacttgcgacggatgacgtacttgcgcacgtcgtcctccttggtcaggttgaacagcttgcggatgttcgaggcacgcttgggaccgagacgacgcgggatctgcacgtcggtcaggccggggacgtcagcctcgccggccttgacgaccaccaggttgagcaccgaaaggtccgggccgacgatgcagccgcgcaccgacttgcgcttgcgctcacccttgcggcggggacggtagcacgtcttgcccttggagaggagaagacgggcacggccgttcgagagcacaccctgcttcatggggaaaccctgcttgtcgttaccgcccgacacgcggaagatgaagcccttgaactcgtcgccgagcacgtcgccctcaacctcctgggagatgcgcttgtcgtagaaagcgcggagcttgtgctcgtcatcgacttcgagcaccttctgggcacccgtcagggggttggcaatgttgagcttcatgttggagaatctgtagagcgcgcaggcaacaacttcatcagtttctgtggttcaattggggcaggctttaatgggctgctatgctgctgacgacgctgcacgtctccgctatatggtgagcgggggcgcaactttcggcgagagctgtagcagccgcagacaattagcgcgcgaacggatccgcttacgcacctcacaagacaataaggacaatggctattgatgcggctgtcggcggcgtccaaagcctcgggcttccccaaccaccaacgctccaacgggaccgacacaggccaaccaagtgcgttcacttcagataaagtttgtcaagctacactacacatgtcggcgtagtatcgatatccgcatcttggtaaatgtatgtggggtcgtcgacgttaagttcggttgaccatagacagggtgctaagtacggggtcccaaaatagactattttgggatccgatatgttgaatcgaactttgacggagcgtctgcgtagccgctcgttcaccagctcacttttgcaagacagatcgaatcgacatgggcaaccaggtgagcactcctgccgcggccgacgctgctgctgccagcaagcagggcggctgcccggtgcagcacgacgccaagaaggcgacgaccgacggatgccccgtgcagcacgacagcgccaagaagattgagggctgcccggtgcagcacgacaagaagccgaccgtggccgacgccatggctggcggctgtcctgtggtgaaggatggcaaggtggagagcgaggtctacaacgtgtacggccagcgcatcgacccgaccaacatgatgccgtacaacccgaaccaggacccgaacgacgagcagcgctacccgctgccgcaggagcgcgtgcagtccacgatccccaagggcggaaccgagggcacgtggctgtacccgtcggagcaaatgttcttcaacgcgctccaacgcaagggcaagggcgaggacgtgcacgagggcgacgtgaaggcgatcgtgtccatccacaacaacatgaatgagcgcgcctgggcgcaggtggagcactacgagaaggtgtgccacccggaccttgagagctccaagctgctcaagttctgcggtcgtcctgacaagctcacgcccattgcgtggatcaagagcatgctcggatacggcgagcccttcgaccgccacgactggacggtgctgcgcagcgacaacacccaggtgcgctacgtgatcgactactacttcgacgatgacaagtctgcgcaggacgaggtgccggagctgcactcggccgacaaggtcaagagtatttccatgtatgcgcgtcccgcggtggactcggtgggcgctctcgtcgaccgcattaaattccccgtgatggctttcatcaacgatatgaagggacccgatatcactgctcgatctgcgctggtggagcgtgcccaggaggagaaggacgcgccggagccgctctccgtggaggaggttgagcagacctttgcgaagatcaaggacacgtgcaagagctgcatgcaggaggtcaagacgtgcagtaacgaggtgcagtgctcgcaggcagcgatggccctgcagctttgcatgggccgcatcatctgcccaccgcaggcggctgcgtttaccaaggcgcttgagggcggcgatgagtccgcagttgagtctgctttcgaggccatgaacagcagtctggagcagttccaggagcgtggcgctagtgcgatgcaggaacaggctgtgcgcgagtccctggccaaaaagtaggtatcacatagacgacaatgggattcgtacgcagctaataacacaatctagacgatttttatgccagtttgttgttgagtgctgaagttttcgtagtctaaccggcagggttagtcgtcgtcatcacagcatacaatcacctgccctctgcagtcgacgtattgattccgcagatgacctgcacgctcctgctccaccttcagtttggtgaagaaatgctccgctgatcacgagccacaatgcaatgcagcacacacagtcaactggaatgtaattacagtacagcacacacccaaacttacgtgtttgagaccaagtagcagccaacgccccgcgttttcggttgagcagagtagctgtttcctgtcgctctttttctttgaagcgaacttgctcaatcgtgttgtagtgaagaagcaattggtacaaactctcgtaattatgatcccgtgcatactgcacggcggatactccctttcggtcgcaaatgaaggggtccgcaccgttagctagaagcaacttcgcacagtcgtgaagaccataccgagagcaaaactgcagtgctgtctccccgaatgcgttctatcaagcatacggcgatagttagagggtcctagatcacttcgaatgtaagcgtggtgtccatcctacctgggcattgacatcacatcctcgtgctatcaggtctttaatgatttcttgaacgtgctggctccgcaatatcaacgcagccacatccttcacagaatctgtagttccaagcgtccaatttctccataagaaatgcaaagccgtatccccgttagcggtagaaagccacaccactgtgccgtggtccagcaggcatcgcacgagctcaacgcacagggcgcggcaagctgccattagtggcgtcagccccaacgttctgtcttcatacacgacaatctcactcgcgttgtcctttaaggcaagacgtacaggtacgttaacgtccaagaacgagtggaactttaaccaggcgatcacttcactgccgtcatgaacacgaagtgagcaacaacgtagctagcctcaagataccgtagcgccggtcaagtacaacgcaaagcggatgacgtaccgctttggagatgcatgcatcagcctccagaactgctccatgccttcacggtgctgcacctcacagagccggatttgccgttcagccctcgaccgtcgcacctgttcctgctcgcctttcaggtgtgttgtgagcttaccaacataatgctcctgctttgagcgtccgtgcgcacggtctaagccaaggctaaggacgccacccttcttctgagagctataagaactcctctcagcgagcgaagccgcatcggaaagcagtagcttcttcttagcggcgacctccatctcgcgctgcttctcgagcgtcagctgcgagcctgcgatcggatacgcatccttcatgtatcgcgcatggtacttcccgcgcagattcaactgcgtctgactgctagtattaccagcttgcagccgatttgccagcaactgtagctcttcgccccccaggtcgtcgaagcgagcgtaaatgctcggcaagctgcgggtcggcttccatgtagacgtcggcgcattgcccacagctttcccgtccttctctgctgcctttgcagcgcggacttcatccctccgagccttcatcgcagcgacatcagccccttgctcctccccacggcgttcctacaggatttaattagtaggataaatgggtcaacatttggtgatagtgaaaggtattcgcagtgcagcgtagcgagcgcaccgcctcgagtcggtaccgctgctggatctgctcgcggtggcggcgcagatactccacgcgaaggcgctccacctcgcgggggtcatccagctcctgctcctgctcctgctcctgctttgcgctcagcatgttgaacaagcattgcggaaaattggcacatttcaagtgaccatcattcttcgtacaccaggggcacaccattaatcgacgtggaactgagactgagacacagcaagagaggggctgcagagacactcgttgccgcgcgcgcgtacatcagcgaggcctgcagattcgacgcaggcacacaccaagagacggcggcgatgctgtcgtcggccaagtccatggacgacgaggcggcgcggatggcggtgctgcgcgacccgaagcgcatggcggcgctgctggttcgcgccttctcctcctccatggcggacgattcggacgccgcgcagcgagagcgcgcgcgtcgacaggaagaagaaaacgacgaggaggtggaggagacgcaggaagagttccaggacctggagcggcgcgcgagcgcggccgacgcgccgcctctccgcgtggtgatccgccccacgatcgaggaggacgaagaagacgccgatgaagccgacgaggaagaagaagacgaggaagatgagaacgaggacaagccgctggacgaggaggagctcgaggcggcggccacggcgctgcagacggccacgcgtatcgtggaggagctgcggctcaagatgctgctgaaggaggggcagcagcagcagcaacagcagcaaggcaacaacaatgacaacgagccgcccttttcgtcggttggttcggtcgtgatgacgccgccgctggcacctcgctcggagaaatgtccgtcgacaagtgaaggccccggtgtgcccgtgccacgtgctcgtgtacgatataactcaggttgtcaaagttgcggcaaatcgttcaacccgttcaaccgcgctaagaactgcacggcatgtggctacgccttctgcccgaaatgctcgtcgaagaacatggtgctgccgtcatgctttggccatcaggatgagtccgtgcgcacctgtgatctctgtgtgaagtggctccagaaggcgctggacacatactttgacgctatggagatggcgaaaacccacgatcaagattcgacggtccatcgaggtagtatgggcgagattatgatcgaggaaaaaccgcgggccatgtcggtcaacaacagttcggtacctgtgagtgacggagtgctgtcggtcataacacggcaacgctcgtctgtttcatcgcctgatcctgttccaagctgtcccaatgaagaagacgcagaagacggtgctgatagagaggaacagcgcgctgcttcgtcttccacgacgtcaacatcagcttcgacatcaaggcgacgccatcgccatgggtcaatatcgtctaccccgtctccgtcaatgaacaagaacaagccctggtttagcggccatttacgcgcgatccatgtgaatgacaggcttcctcgaaagaagaaggtccgaggtgagagtgagtgtgacaacgaaaacaatagtccggagctgagatcgcggaggagccgtttaggtagcgtggcgtcgaccgcatccaacacgcgacacacgagcgaagacgctaatgagagggctgaacaacgccaaggttctagcgagcacaccacaggaagtagtccgctagacaccgaaagtggaacagactcgacaggtgccccgagggatgcaagcacggaaggcgatgcatctcaaacacctgccgatggttctgagagcaacgatacctctcgacctcgaaggaaagcgcgacgctccaagttttcgagatcagcgagctttgatcttacgaatctgcaggccgctgcatcccccgattcgtcatctggatctccagctatgaaacgttgccatacctttggtcctgatgaagcgagaagcattgctgctgatgttgctagtaatggcagtagtcactcgaagaaggcatttgatgacagtgatattgtggatgaacgtgcgcagatcgactcaccggaagtgaagatgaaaagtgaagcaaaactatctgcggctgtgttgcgctttgcggtttacgaaatgggtgcgaaagagaacgcgggtcttcgtcgcacgtttggctttacgaaagctaacccagtgctggaccggtatactttggagcttgattgtcgccagcgtatcgtgcgagcgaagtcggtgttcatgcatcgcttctggtcgttccactgcgattctgttcaatcgtttgtattcgggtcttcagaaggaatggcacgtctcattgtgtttaatggcgggcagggcaaccagtctctcgagttaaaatttgcgaatgatgacgaaagagagcaattcaagcaagcgatggatagctgcaggtcaacaaacctggaccggatgcgtggatttgctttgggagctgcgatgtcacttcctgtgcgcccggagcttcctccatctcctgtgccagacaacctgcagtcgccgctaataccccctcagccgagcaccacgttttcaggagatacgtcaacgtcgattgagtcggagctgggactggttcgcgatacaggcggcaaaaattctgttgattcccccgttttacaatccatccatgtgccacttttgcctggggaggtggtggtgaaagacactgagcttccagtaacactgctaatcggtccagccagcgaaacctttgaatcaactctcgtgtgggggcgtctgagaggcaaggtagccgtgacaaattaccgggtgatgttcattccattcgaccgagtgcgagcgattcagccacggtgtggtgggcaaggcggaatcgcatacataccattatttgctattacgaacacccagctactttatcctggaggacggcgaacaaagtctggacgcacttactacgcagggatgacaggctctgcatcaatcatctccatcagctgcaaggacattcgtgttttgcgattccagttggacacccatccttccgtgtcggacgatcacgcgcacaagttacgggcaactattgcgaagatggccgatgcgtctcagcgatacactgtcgtagaacggggcagctcttcacgaacgagctctccaggtcttgctcccttatctagtacgacaagtggcaccgatacaccgcccgagaaggatggtgacgccagcggttcttggcaggagccttcctctgtgcttggccatgccatgtcgcgaactcctgcatatgcagcatcaccagtccttcgccctgatcggcttctggcaattcctcgcgaaattagcggatctttcgcattttcatacttgatcgatggtgtgtctgctgatcagaacggctggaatatctttgtggacgaacgtgaatttaagcgccagattggcggcgatccagcagtctcaccgttcctgaaggtacgataacactgcctattgtgcggttttctttgccgagctatactccacgcaatgactgaccaaactgttcttggtgcccactgtctcagttctacaagaatgacagaggcaacatttgcaagtcctatccgtcaaagttgcttcttccagcctccatgaactcctcgacgctggccaaagtggctgatttccgggcgaaaaaccgattacctgtgatcacctattaccatcgccgcaatcggtgtgtcttgactcgttccagccaaccactgctgggaagtttgctttcgggaagttcaaacgtgtctgaccagctgctcttgggagtgtatcgccgacttccagacatcatcaaaaaccagtcgcaatcgtcgacttcatcgcggccgatttacatttttgatgcgcgaaagccgaaggcctccaccggtaaccggcttatgggcaaaggaggcgttgagacaccgcaagattatccaggcgccgtcgtccaccatctcaacatcgccaacatgtatcggatgcagtcttccttcatgggtttgatgaagctgttcttgcctggcggcatcgaggatgccgatcgcacgtggctatcgagtgtggagtcgacgaggtggctggaccatgtgcgccttgtgctggatggcgcgctgaagatcgctcgtgtgctggagttagaaggagcgtccgcgctggtgcattgcagtgatggctgggaccgcacgcctcagttgtgtgctttggcgcagttgatgattgacccgtacttcagaacaatccgtggcttcgcaactctcgtagaaaaagattggctagcgtttggacacaagttcgctgagcgcacctctggagaccgcaaccgcgacccgcagcgcaacaaagcatcccccatcatgttccagttcattgacgccgtgtggcagatgcaacgccagtatccccgttcgttcgagttcaacgagcgctttttattgcacctggcaaacgcgatgacctcgggtctctacgggacgttcctgtacgatacgaggcttcaacgagacgtgaacgaagtcaagtacaacagcgtctctgtttggacacccgtgctgatgcagccgtcgctgtacacaaacagcgactacgaaatgtacgacggtcctatctggccctgggttagctgcaaaatgattcgtctgtgggacaactacttcttccaatggcaccccaagttttataagtgcgagtgggcatgcaacttggtctaccatggcccttcaagctcgcgtggtaacaccagcgagaacggggacggtgtcagcgacagtggagaggaactgaacgagacaccgcacatgcaaaccccacttgttagggacccgccagctttggatctactggcgacaccaataacttccgccatcactgaagatgacaacgaagtaccgacaattagtctgtcgtcggaagagggcgacaccgacggcaagcgatcccgtacctctagtggaacgtacacgcggaaagcctcgaggcgaaacctttttggacttaaccgcgggattcgccagcgagcgcaaagtgaagaaaaaggtgaaacgtgctagattcaaccaccgacaagcgacgacttgactcaaaatgctgtgccaacgtaggaattgaaagcacagctggacgacagtcgtaaaaatgtacgttgaccctgtaacctgatgggaaatcatcttcctgtccatacaaaacatgggtgacgcttgcgcctgatgtacagaagtgtttggcagattgattgtgtacttgtgtgctcctaggcattgtttgctacaggctcctcaggacaagtatcaattacgatggttccaggtccagcagtgccgcaaagtcttgatccgtaaactttcgaaacaacgccgctgatgtttgactgcgcacccagtccactgaccgcctgccccacggtgtacttggatacctcgctgctttggagctcaatgtatcgctcaacgactgtggcttgcttcacgaattcaggatcgttgcccagtttctcgaagacttcgactgcctccccaatcgtttcagtaacgaaggacggcggagtttctcggaagaagatgtactctttcgtgggagtactgccagggtttccaagctggacacgtttcggacccgatcttgacgcgcgcttccggagtgcatatgcagagagctgctcagcattatcaccatcagccccagttggctggtctggggaaagtttgttgccttcctcgtcaacatcgtcgaatcccatcgcgcgcaagtcctttgcccgagccatcggcgtcgacccaggctcaccgatgactgtcccatgtggctggtggtgaggtgtggatccagggtggttgaggcgattgtagtcgccgctgacttggctgttaagcggagtgccgctcgaaatcgtgtcagcgtgtttatccaagttgctggtgatcacgttcagtgcaggctttcgtcggctactggacgactccttcgttcgtgttttcttttcgtttgaagctgagcgatcctatgcattgcacagataaacagtcaagacccggggtctgtcaaccgctttcaccaagacagagctcaccttagcattacgcttcgctcttgctcttatcttcgcctcgtttgagcacacgaggaatcgctccaacagagattgacccgcggtcgggtttgttgctcgactgtcgctcgtgtcggttaagcgttgatcgagctgcttaatctctgcatcatccagctgcggcatgggctggatagagcggatcgcatgaattagtgctggaaagacaagtactaacaggaaagtcaacttcacttacccgttcttgatcgagcatctttaccacgttttcgtggcagtgcatgagcaaaaactcccgtacgaggtggtgcacagtcagcccctggttcgacgcagcgagattcctgagctgtctctcctttgggagctgtcgctccggtgtcgattcgtacgtaggagcgagctcaccgcctctgctcccagagtcgacggactgcaccacatcggcggaaataatttcgttggccttggcacttgttaactccgtagtggcgctcgcatcgcttcctttgcgagtttcatcccgatcttcttcgtcgtcgctggcttgctgttcgtccaccaagaactcaaccctgcctcgctgcttcctgctctgagactgcgattcggccccccaccccgaggtcgacgcaacttccacttcgtcggcgaagcaagccttcttgactcgaggcttcgaagccaccggctcgtcgtccaaagtccagacgttcatcgtggtcgttcggtgcgaggtcgatggaaaagtgtcatcctcctcatcctcgcgccttccggcggctaaagcagacctctactggtaagaccaaccgctaacaatagccacccgctgatggcatgatgcttgtcaatcaaaaaatagatcttattgtgggtgcagccatttcagagtggaacccaacagtacgcatttagctgttcgacactgtagccatttcacacgtttcatgacacgatggtcgccgcgacacgcgttcgctgcagcttccgtcggcttgcaggctgcatttacatgttgcattgttgagttgtcgaaagaaaggttggatgtcgccgctgcagtggggcgggccgccagcgacaccgacgctttgcaatcaagctcaagtcgtcctcccacgtcaacgtggatgcgccgtgtgctggctggtctgcattggttggtcgggggatgagctgctcgagacaccccgcagcggattcaccgcggacctcaccaacgatgttcctgggacccccggcggcaacgaatctcgcggcgcgggatctgctccctcggagcggtctccgatttcgctttacgccatctgccagcgcagaagactaacacgatgtcgatgaattttggcgggcccagcattgaggatgaggctgcaatgacaaggtctccgctacaagtgaaagaccccccttcggtcgaatgaaagtactggcatatgagccatgccattggtacaggtccctccagcgccttgctatcaatacggttgagcaggaggactcattttggatgcagcgtttacttcgagactcccgaagccacctcttgagtcgggaggtggcttcgcgcaccttatggcggagtcgcctactcatctcgtggtgccggctttacatgctgccgcacgagtgactcgccttcatccatcgactgttcgtcccgctcgaagctcgagtcgctgcacgagggttggttgccttggaacgacacggcccaccggctcaagcattgagcgcgttggctcctgacgtagagtcgtcatgtacgaagactgcgtcttgtgcagctcgcctcgcgctttgcgcgctgtatctgttgggaagtaatggggacaggcacacaggtcaactttggtttccttgcgccgcctagcgacatgcccaggacgagagcagcagacgctgctccacagtgtacacgtagcacgcaattgacgacaaggggcgcttctctcaagcagttaatctcggcgaggcagtgcggcttccggcgagaaccgggggccaggaatcctggcaggatagcgccaagatggtgttcgccctggtccacgccgaccgtcggcgctcttgctcggcgagcagatccccaggcacagccgactgcagctgtggaatgatttggatctgcggtccgcagtgcggaggctcgaacactccatccaaaatggcttcgacacggtccgtgttcgcgtgttctgcgattgttttgtaaaaaaattgggctccagtgatcgaaagcgtcgccacatcgacagcagcagcgcttgccccgcagccgaagcccagaaaagcggtgcaaaggcgcagagcctgccggggaatcccggctcatccgcgaccagctctgctcgctcgcagcgcttcaaggcggaggctgtacggtctgctttgagcgctgagctgagctccctgcggggcacacatcaacttggcgctcttttctgccgcaggagcggttcaagtgcctgagcctcaatctcgttgagtgagcatgtgggccggcccacacatccccctccatcttcacgtgaaaaaagatcgccccggtccatcgccctgcagttcaaggctctgcttgcatcgagcgattgaccctgatttacttaccatcgctgcggtttcctagcagacgtctcactgagaccgaccctccgcagtccgctgagaacaataatgccttacgggcacccgaaacatccgagacccggagctatggggatcttggtacgtctgttgcagtcagcggagactgcaagctgcttgcagtctccacctcgagcccctctcttccgagcgagatcgcgaccaaactgctcgggctcaggtcgtatttttatcgcaccgacgtccgcactgtccaatctcggtgtcacgccggccggcatctgccccattgctgcgcgagagcctgtagccagacggactgcggctcaggatggttctggcgggcagatggtgcggcaggtggctgcgccgagctgccggcgcgacccgaggcgatcaacgcactccgtcactcctggatttgccttctgttgctcaagtgcctccattccccacctccccacacccctcgatcatcgcaatggacgcctgcctgcagaagttcgagacgagcatgggctccgctccgaccgcggcctcctcgaccgagcacgtggcctccacgccgcgccgcgtcgcccactgggacagcaagcgcgagaagtgcaacaactgcgagctcatctacctgaagaccctgagccagcactcgggcttctgctcggtcgactgcaagtccaacatggcgtatcttcagaaggtgaaccacaccatccgcgccatgaaggacgcggtggacgagcgccagcgtctgcaggagcaggaggtccaccaggaaccggtggccccccagcaagggccgcagcagcaagtccacgtcgcccagcagccggctgccaagctgccgcccagcgaggcgtcccccgaggtggacgcttccgtcccccacagtatcaagcacgtgcagtccttcgctgagttcggactcgagacccgtatcctggacgccagcaacgtcgagtggtctttcagcgccgtgtactaaagagccaagagccgagtgtaaaactaaaagcccctcacgatagagaatgccacgtgagatgtatataagcaagcggcatataatagagcgccacatagagatttacatattcaaaccgttgagctccttctctttcatttgacacggagatcttcagttacatacattgcgatctcccagcactttgacccagcactttgacggacgcattaatgacgcatatcaggagtctctgctggacgtgcgcaatgagattcgttgcagcggttcctttgggctcgtgctgaagcacgcatgagggtgcttaggtagacgtaggcacttcacgcccgagctcatatgtacatccggagctcgtcgagcagctcgtgaagctctctatgagcaggggcgtcgcgttccattcctgctaggagcagtctaccatgtgggtgacgatccgcatggctgccaaggaggcgaggcaccgtaccgcagcgctggccgcaggacgcgtttcaggcggtggaagcaacagcgccgacgtggcgaaagattgcgagtaacggatggggtggggaactaagcgcccagatgatcaaggaactggcatagctgggcccggcgaccactgctcaaagcccaagatgcgagcatgagaagctccaggctggagctcgagcgtctccacctcgccatggcggctcggctcggctctggcgaggaagcgaagcgccagtgaaatgctgaaggcgggcaggcaggcgctgagttccgcgcgatttctggtcccgaggctgcggatctctcgacacgcgggcagatcgacgcggagagcgcgctcggtctgcgcgcgcccagctgcaaactgggccgaggacagggcgaaaccaagatgagagatgactaacgtccgatcgcgctcgccgcgcctgcgagcgtttaactctgtccgaactctgggtgaaccagtcgcgcgctgcttgcggtacagcaagagagagcgagaatcaaggacgtctgcgacgctgccggcgccagcgcgttgaagcgcagctcgccacgtcgtcgggtgcggcattcgcgccggcctgtccgctgctctggaaaaaaggtgagccggtctcgccgagcgagccaagagaggggtccattccagtgccgcctcgcttgctggccaatgctcctgagtctgcagacgaggccgttgctccgccctcgacaatggtctctgcagccgagaccgttgcggagaccgtcaaaccctggcgagtcatcatgcagacgaggaggacggaggaaggtccctcctgcttggcgtggctctctttcccgggctccggctgcgccgctccggccagagcagcgccaaagtgccggcggcatgacgcagcgcctccctgccgatgcttaccggcgagggaacgctcgtcccacacatgccacggagatctgcaaagcggtggcatcaagccgttcgcggggcgagacacgggctgcaccgcttgggccgtgtttgctgctacagcacggtacagtacaggcagcgagcgagacgttctgtagccttcagttgcgccgcgcttcagccttggcctgcttggtgaaatggctcttgagctggtccatgccacgatcgattgatgagaactctgcatggttttgctgcggtgccgcttcatgcgcactatccatggctgaacttcgagatccatgaagcctgctcctgtgctgtgctctgctctgctcctgccatggcactgccatggagcccaggcaggaagctcgtttcccaggattggagacggaaatctgcgacgtcgaactggtcagctccagcaccgccgctccacccagccccatccatcctcctccttcccaaactcgcctcgatggtcgagtgtcgctctcgaagctcgagtattccacgtggcaaaggctctgagtttttcgagccaaacaaagagcgccccgttgtcgcttttgttgctgcgagcgccgaaattccagcggcgggaagcgagccagcttccagtcacagtggaagttccactgcgttcgctggtcatgacggcgagaggtcccggatctgtcgacgagcagcacactcgcagatactttgcaaattcgagcagtcgttgaaccaactaactctaccgtacagtgtacatgtagcccgctgaccagcaactcaaagatggctcagacgctgtagatatgagagacgcttgctgaatgcttcttggcgacaggcagcgaagctcttgaagcgattgctgcccgtacacgagcgctgcgagcgctcaacggaagtgacagcgatatgcgtgactgcaatgcaatagtctttgctgccgactggtgaatgccactcgcattcatcgcttcgaaaaactaacttcggtctcgacagccatcgaacagtgccggagcatacagtatccagtattcgagtcgcagtgtgtcgacatcctcactgcattgaactaagttggcgactcagtacaccagtgccaagcctaaaccagtctacacgaacgattcaacctgtaagcttagacaacaaccccttcaacctcgaagacaggtttccctacggcaaagatgctttctaaccggcctaaatggaagagctcgcgccggtgaataatctggttggcactcaaatgtatccaaggtattaaaactgcaatgaaatttatgcctttccaggatacacttcttcacgttgcgtgtcaaggttgccacgtacccaagtgtctttttagccactcaaatcactccaagttaattctctgcaccaatcaccgcatcctaaccaaggtggccgctgcatcatcgccgccaaggtcgtgacgttcctgcagcacccccgacacccccaggacagcccgaagaagcaccgcacgccatgggcaacccgcgccatgttattgtcgacgaacaggtgaccgcgctggggtccagcggcgcgacgacggccttcgagttgggtctgctggtgggccaagtgagctcctcgaatgctggcgactccgtgctggcggtggtgcccgttccgtcggagagcgagaccggggaggctgcgactgcactcagcgacgtgtcagtcgactgggtgcaagaggtggctcagcaggtcgaccgcttgctgcccggaggtatcaccgtgctggggctgtacgtggtttcggctcgggacgtttcgacgctgcttgtgccgtacctgcgcgccactgctgaggcggtggcgctgccctccaacgtgaacgtcggagacaatgtccactacctggcacttgtgtctgcgagcggggatgttgcgttccagagtttctacgacgtggcggatgtcaacaagactcaaatgttgcctgcggaacgcaaaaccccgacgacagacatgaagttcaagcagtaccgtacgctggttgaccttgacgagcccaccccgttcgtgaatgtcccgccaaacgcggcgatggcggctacggaggtggttgagagacgtatgaacgaggtggagaagcagttgaaaccgttcttccgccgggtggaagactccattgccgttcccaagctcacgggagatacggtggctcagcacatgaacctgctgacgttgacacctcccgaaacgaagcagtttgtcgaggatgtaagtggcgtacacctttttagtttgcgtccgagctgtactaacgaaatggttttgtgtcactcgtgttttgtagccgctgggtggcatccacgggtctattagctgcgtggctttcgtgaaccaaaacgaacccgaggcgaacgaggtggcagcgaattacctcaagcgagactttgtgaaatccttgttggtgcgtgtggcgttggctcgtgagaggtgggctgaggacgacgaaggtgggctcaaagatctcgagaaaatcttgcacatcaagaatcttgttgctgatcttctgatatgtgtctacagttgagcccaacgcagtgttcaaggaaggtggcaccattcgtctcgcgcagcgcggtctcgtcccgtggcgctccgcagccgcgtcgagtccgcacttttccgcaacgatccacgtgttccccgacgaagacgtggttcaggcggtgaagaatgcgctcgagatcctcggcggaggcgctaacaacgacgccgctggctgggctgcaatggagatcggcggccagttaggctctcccatggatctgacgttcggggttaccgagtcggagcacttcaagttcgtctactacctgctgccagtggtcctcgtactgatccttctggtagcccagtacatcatgtgaggaggacgttaacctaaaaaacattgcgaacttcatttcttacgaggaatctcgttgcctgagtttttggacttggtactgtgctgttgccggcttcatctgaatggattattgatgtacgaacgaactgagctcgtggtgtttttgctgtgataagcttggtgtgttgcattgaacttttagttttctacagatttcttgtatacatctagatctacatcgattctatcctctatcgcgaacgcgtacttgtgcgcgcgcgtttaatacatagcgctgaaggcccactcgacgttgctggcctcaagaatacgggactcgaggccgaactcggcgaacgtcttgctctcggcctcgacaatctccagctcgtcgtcctccgacgcctgctgctgctcgacctcctccttctcctccttcacaggctgctgctcctcctgcttctgcttctgctgctgctcctgcaccgcgtccttcatggcgcggatggtgcggttgaccttctcgaggtacaccatgttggacttgcagtccaccgagcagaagcccgggtgcttgctcaaagtcttgaggtagatgtgctggcagttggcgcacttctcgcgcttcttgtcccagtgggcgatgcggcggcgcggcagcccgcggggttcctcggcctgcacgcgcgagtgcgcgctggggcgggccgggtacgagcgagggctgccgggggcgagcagcaccggcttctgctgcttggtggcctcagcgggggccgacttggccgaggtgaacagcatgctgctggcgagcttctgcaggaaggcgtccattgtgacagaaggtagattcgaactgtgaactgtaggaggcacttgcgctcgctgcggcaaaaactgaagtgagttgctaagtgctgagctggccggcgggccatctggtcgaaacgctgcccttttttgctagtaggagtggcacaactgcagcagtcgatacaaagtctggcagggttttaccagcccatctccctctggcttgggctatccacagtgcaagagcggcaacagaacggaacaagggacgaggaaaaatgaaaagccggagatcagaacaggggtaagttgctttccgccctagcccccgctcgggcaaaagcaccggcaagcttgccttctggctcaaaacggctgggccagccatcggcattttgactgtaacatggctcggccttgtcgtgttgagctcgcgctcgacgccgcgagctcaattccacggacatgaaaggttgcacgctgcaacagtacggtacagcatctgtagtgtaaatttcgctggagacagccagagcgctctatgggtgtagcgatatattcccgagctttggcagctctcgctggcgttcacctacaccgccggagctcatgacgttagaatgtttgactagctcctgggaattgatctcggccaaaaagcccgtcgataccgtttctccgggattccagctgccgctgcgcgcgatgaggaggcgaaagtttgctagctttcaagtcgagcactcccagatgtgactacaattagtcaagtaaactttggcagagccacccccggtatacccgccgaggatgaattgacgaaacaagccgcatttataaatccatatatgttcgtacaagctgtcgtcacttaacgctccgtgctctgagcggtcgaaataggtcgccccgcatggcgtataacactgcagtacaaatgtaaatgtagctcgtgcttacgagaagccgtgtttgcggacgatcctcccatgccattgccggctgtggaaacccgtcgtaaaacaccaccacttgcatacatacaccccagttgggatctagaaatgctttggtactttaggcaagatacggtctgacgacgagaactaacgtctggggaggtttggtttgccagcttacttaagagaccccaaataaacccgctggtacatgtgtacatgtactgtattgtgtgttgtaccacaaccgcgggctgaaatgcggccgagtgatgaaatgaaggctgtgctgctgaaatggaacggtcgtctctgtccgcatcttgagacgagaagcaagctcttgagaaactcgaagctgaaagagaagccgccggctctcctcctccgctttacactccgccgtcgatcgttcacaacctaatgttaaagccgccaaggcagctctccttttcgcgcctcgggaatgcgacgtttgccggtgcaacactttgaactttgaagtgcaaagttgctttcgtcgtcgcgttgaatccactgcaacttcagttttcaagtctgcgccaaaggtctcgcagggatacggagcccgcggcgttgggtaatgccgaaagactgaaaagctgggctttgcctcagcgacggccagcttgcgactcgcacccttcgcaacttgcgtggcgtttcctggaatctccacactagtactgtacgtggcaatttgtacatgtaaaccaacagaatgacgcgtcgacaaccccggcacaggcattgtgacaccaccccgttcatgccatgaatcatgggcgactgtgcattgcatacgcgctccaaaagcatcagcgaggacgacaacaccatgtggagtcttcaaagcggatgaagtgtttcattcgtacagtacagttggcagcacaaagtcatccccacgggttgctgcatgcatgccgaaatgcgaggtgtgtaagcttatcacctcaacttgggccccttgtttggatgccgcttgggacagtttctcgtgcttcctatcctcgtcacgacataccgctgcctcggcgcatatttcagcagcactcgatcgaggattgctcgaatggtatcatcagcaagcgggctgggcgccgggcacgcctgactcgatcctcctgccccccccccgcttgtcgtaattgactcagcaaggagtggcggtcatgtaccactgcagttcttgcagggtgtccaagcctgttgcgctctactgtaccttcatcttgcgaacgagcttgatgactcgtccatttctgaagcagggcctgcctgctgcctcgtcactgactgggctgatggactgcgccggtgtgcaggcgccaggcaacgactgggtggtgcagagtgccccggcaaatgagacagatcggcgccgcaatggcggcgttggcgctgatgagtgtgtgatccggtgtcgtcgggtcgaccgagttggttgaaagcgccgaccgacagggcgccatcatcttgaaatgaatggctcgcgaagtggcctggtggcgggctctcttcgccgtgtctgtcagcatgacgaccgagtccctgcttgcatctcgcactgtctgccagggctgtacggctctctcgctaagagttgggggccccaacttggggctctcggccagagtctgaaggggactgggcgggccaacgatgcaggcatccctggctacagtacagtgtaccattccctcgccaggcaagtcgcttcatcgacgagagtaaaggatacagtatccttttaggtctgcaggatactttggcttcaagccacaggggttgaaactgaagtcaaatcggcacccgcttgcagcggtatcgacaatcaagggatcgacaatggactagtggcccgacaggtctttgatttacgaggtcggctacgccgtctgcttgctaacgctacgtatgcaccaagcgcctacatccttctccctcccttccgaggctaaacgtcaccggatatgcatgtcgggaacatgaacgcaagcagttcaaccgtgcctcccctcctggctgactgaataacttgactgctgtccggccaactccgcggtacttcctcctctcgtttttcttgtctttttcatgatttatcttctcgtcctcgctcgcccgggctcgtcatttatcacgccgaaacccacggacgacacttcctgctccttcgctccaaaccacactggactcctcagcccgcttccacgcgatcgggcttgctctccgccttcgtgactcgtttcgatgctcctcctcttcgacctcctccctcaaacatgccccataatattgatagcgtagtgtgtttgccttcgtcaagcgctctagttgctggagggcagcgaagcagcgccgccgctctgggcagtcatgtcattggcattgttgtccatgtggccaggcatctcgccgaacatggggccctggttcttctccttcttgtgctgcactttgaggcgcttgcgaccaacctggaagccattcatgcccttgatggcagcttcggccgacggggcattgtcgtagctcacgaaacctaaagataccaataaaaccagtcagtctgcgtagctcttctcttacagcgcgggctgctgccacgtaccaaagccacggctccttcccgtctccttctccaccatgatgcgagcgctaatcacgttgccgaacgtggcgaagtaattgaagagatcctggttagtcatgtcgttcgggatgtggaagacaaacaggttgcatccagggggtcctgcacgcaacaatacacaacacgcaatgtttccaatcacgcacacacgtgaagcaagtgtgatgattttcaacatttagtttcatgcacaacacacacgatatacaggcaggcaggtagaaatgcactcaatcatgactcaccttggccgctctccgtggtctggataggagggcccggacccacgatctgcggcgggtaaccttcacattacaaagcaacgcgacgcaatgcacatcaggaaacgtccatacacataaagccctctcttgccaacgtaccgtaagcctgcgggaacgggtacatgtaaccgctgccaccgtacgggggcgggtactgcatcggctggccgtaaggctgcgggtatcctccgtacgccgcggcgcctgcatcaatacacgcaacaccgccatggtaggaaaaaggatcagcttcaccgctgccacacctagctatcgacggactgtagtgtactacagccgacacaagaagaggatcgcggacgcaccttgcggggcctgtccgccaagctgtggctgctggaagcctccagcctgctgctgctgcggctgttgctgaggctgctgctgctgctgaggggcgccagcacgaggcaactcggtttgcggggctgtgagctcggccgggctgcagggccgaaagataagatacacagaggaaaggtaagcgccggacgaggagctacgttaagaggataaagagaagacgcaccgctcccacgtggactcgcccgtgacggcgttgtagtagtacttgcggccattcggcgcgtcgtgctccgaccactgcgaggccgcgggcgcttgggcctcgccgccggcgttgggatccacttggtcggccatggtgcgtggctggctggtggtatgcaatacacgcaaaatgaaaaatgcagcgcggggggctacggggctggcggcctgctggcggcctgctggcgactgggctgcgggcgggctgggctgggctggtcgacgacgacggacgaggctgtgggcgactcgatccgctgcttcaccctgagtttccttcgtgcagtgcagaatatgggggtagcggggaagcgaggggggacgattctcgcttgagtgcctttttaccgcgtttgtgtgacaaatggtcactcaagcgcgggaaattggcactcaagtgagaaacgtccccctctcgttcacgaggttttcggccaatggagatgctagacggacgccattggctgaaaagtgaaacggaagatcgcatccaacttgaagctgcctgcaaccgtcctcggcagggccaaccagtgccatggtaggaatagtactcggctgtggtcacaagtattgtacagatcgaatcgcgataatgaagattggtaagtagccgcagagttgagggtcaaattgtcgctgttgaaccaggattgaagcacattcagcatgtgcatgtagcggcaactttgtattgacgatcagtcgtgtttcttggcataacagaatgaaggtcaccacgatatgccactgggtcaagtcgctgtggaaagttatcaaaatgagtggtgcatgtcaaaatatctccggtatgagcagactttatagagcaaacggtctgcggaaacgtcgtagttgcgatgtcgtagttgccacagacatcttgctctacatgtaaaaactctgattataccggagataacttgacgtagctctgacagtgacaacctgcgtccaacgaacgctagcctacgccatttcgagtgctactctctatcaccctttcaacgtaacggaacttctttgtgctttggtccgtgcaccatagtcttcgccgccgccctcgtgctggagttggcagtgaaaacctgaaacaaaagacccgcagcaacgtgagggacgatcacgatgtggtacgtgtacaatgtaagctgttacgctcgacttacgcctttcatctcagtaagagtatacccccgtccagatactcacagcatcacatcgatctttatttgagcttttttagtgtcctgcggtagtggctgacaagttgctaggttgttgctttgggagctcagcgagccgaaaagagttatgccggatcttgtctagaacagcgccagaaggccggcgttcagtgattgatcggggactaaattatgcccagaggtacatgcgaagatctcatgtactaacagaggcgcgcactcgttggatatgcattgtaaaagcgattctaggcacctaggtcggcttcattgaatggcaagatcgcgaaggactcagaggaaatacttgcgtacgcgcttgacaacaactatgttgctctgaatcggaaccagctacagcggtaaatgatattacgttgagccaaactgcggtaacatcagcgacttgcttaaactattcaagacatcattgcagttgcaggatacaccgtcggggcgatttattggcacaacgccccaacattgctgccgtcatgttgatttatcaggttgctcctcattccctgggcacttcgatgctgtaatgcagtaatttacagcgaccctcctgtggcgttggaaacgtctgattcttgcgcagtacgcgctggtgttcgaccttctggcgtgactgcgtcttataagggcgtttggttcaacgtgcgaatgcgcggcggagggttgttgtcgctatctccacgcaagacgcattgctgtgtaccgtattataatacactggccatcagacttgagatcgttgtggatgaggaccacaccgaggcggctctgccctgggagctcttatcatgcacgaacagcgagccatagtcgacaggcgcatgacaggcgccgcccgtttcgctagtggcgccacgaacgcgattgcagcgggtgttcggcccgcgtccaccgtgaagcggggagctcgaagatggagacgccaaggacgccaagtggtccaagcccgcggcgcgggcatgcccatcaaacgcgtagattccgccacgttttttagtctgagagactaacccatctggcgattaattctacccataaacgagtcagttcgcggctcggccaatcacggagctcgaaaactcgtcagaaacggagcttcaaccctcgcgtcctgacgataccggtactgtattgccccgggacaaaaattcgtgggtgcaggacagacccggcatactgggggcaagtgttcagtctccgctggcccagaagccggtagaggctgtgagctgttagcacgcacgcagagagagagacggcattcccagttttgcgtcgcctcccgccagccttcgaggaagcaggaagctactgcaccagcaagttgaggaaggagctctacccctcccaccctcgctgctgttatcccccccctccttcaagcaactaactacccgcgatggtggccgcccgcaaggtgctcatcgtcgtcggtgtgctcgtggtcatcggtgtggccatcggcatcatcgtcggcgtcacgagcggtggcgacgatgacagcgccaacaccagcagcggagagacgacctccagcagctccggctcgggcacgggcacggcgtcgggcaagacgtccacgtccaccaatgtgagcgagtcggacctgctgaccaacacaacggccagcggcagcggatcggtcaacaaggagccgtcgagcgacccggaagaagccaaggccgccctcaccatgctcgccattggtgactggggcgccacgacggacaagcccggctcgtgctgcaacaagtatcgcaaggtggccaacgactcgctcgagatgaaaatcgactactgggcgcagatcaacatcgccgagatcctggcccaggccgctggtgacatcaagcccgtgcgtatcattggccacggtgacaacatctactggaacggtgccggtcccgacgacattgactaccgcatggagaccacgttcgagagcgtgtacgaccagccggagctggaaggcatcccatggatcaacgtcgtgggcaaccacgatctcggcggctccgagtacatttgcggcgacaaggactacaacttccgtgagtgcgagagcaccgaggagatgctcaagtacctgaacctcaagttctcgctgcagcaggagtacaagagcgccaacagcgaccgttggaaactctcggaccactactacgtcgagagcgtcgaggagaacggcgtgtcggtcgacatcttcaacattgacaccaacttcgccgactcgcacggcgtcatgcagatctgctgccagtgctacggctacgtgaagaagaaaaaactgagcgagaaggaggccaaggctctaggcaacacgtgcaacgaccgcatccccggtgacgagctctgcgctggtggtgacactgagatgtacaatgcctgcgccgacaccatcaagcagtggtgggacgactcgcttgagcaggtcaagaaggacctggcggcctcgaccgccacttggaagatcatcaactcgcactactcgccgcacttccacatgagtgaggacaagatgaaggagtggttcatgatcaccaaggagggcggcgcccacgtctggttcaacggccacacgcacggcttcaaccacgacatcagcaactggggcactcacttctacgagaacggtggcggcggtggtatccagtccgagacgtcgggcatgccccctgaggtggccgagaagtatgtcgagcacgcgtggattgccgccggcaacccgtacggcttctttatgctgcacttctcggaggactggctcaagaccgagttcgtcaccttcgacgacaagtggacgttcagcgtcaagaaggacgagatcgttaagggcggctatcagaagggtcactgctggcacgtgccggtgactgtcggcgctggcaaggagtgcaccagcagcaagagcacagtctaaactctgtaacctcttcatcagcgcgtgcaacccagctcggcgcttttagtgtttgtagagaacttcttagtgaccgacaaccgtcgttcactgttttgcccagcaatccatcgaatcaatatcattgctaaactcaactcaacttgttaaatacttaaactgcgcaactgcgccgctagtcaactaatgccatgtcggcatgagcatctgcaggggtcctggactgcccacccatttggaggtgactttgccctgtgccacctggatgcgatttggctccgttgtcagcgaggctgttggtagacgacggttgctcctgttggtgttgatgctgctgtggtgcgggatgtagttgagatttctccgagcctggatcgtggtgcggatttgggtggatagctttcgatgtactgcaatggtcgatcgttccacccgacaccctcttgacgaccaaaggcgaatcctgcctcccaccttcgttcgttttcccgtcctgcctcccgttcaccgggcggttttccgtgtttccaataacctccccgttccttggctgcacttgagtctggtggtttggtggtgagtgagtctgcgcgggctgctcgctattcctgtgtcgctcttcctcctgctgccgagtctgattcacctgcgccttctccacctccagttcgtccacctgcttctccaataggtcgacttgcttctccaatccttcgttctgctgctctaactcctttacccgccgcttcagcgctttattctccgcgctcgtcttcgccacgaactcctccgcctgagcacgcagcgccgcccgctcttcttcgaactggcgacttaactgcacctccatattgctcacgtactgcttggcttcttgcactacagtcccgtgcacgcgtccgaattccgcgattctcttcagttgctcgtctgtagagtacaccacaaacgggttagtaccagctccaaacactaacagaaatgcaccaaacctactcgtaaaatggtcttcaatgtgcataataaccctctgctgccacttctcgagctccgcgacggagatcgtcacaaccgcttgttgctcctcctcctggtcgctggaatcctctgctacctcctgtcgatggatcacgccgtcgtctccgctgctccgtcgcttgcgtcggttcttccgtcctgtgcgagtatcctcgccaatgggtaacgctgagtgcaggctgtggagccgagagttcggcagttgcacgccgtccgaggaggactccgtgtccatcgccgtcggctcctgtataatgcctcccgacccacgccgagagggcggagacccatcgtccgctcgactggacgcctcggagtcagctgaagacgagcgcgaggcatgtggatccacgtagcgccgagcggagtacctgcgcgtgggtgacttggtcctgcccatcgttactgaagacgccactactggatcagggtttggtagtagtgagaatttcggctagcagtgatactactactactacccggctcagagccgatagcactaatactactattagtagtcggagaacgccattagtagatatcactactaataccactactatagcactactatagtactactattcccactatcggcgagataaagacgcccgtgccgcagtgtaattggtctgcgtactcgatatttgtcaatcctaagagcgggagtagtatcctggtatttcagccaatcatgttcgtagtggcctcgccacgaagtaaccagccggaacacacgttctaggaacgctgttgaacaatcacgccccagctaaactcgagcatgtgtagcagctgactgcaacgtcgacgaggacatcagcaagtctaaatttgtacagtgagatttagcagcttcgagcacaacagtaactcagacacgcaccaggaccagccaccttacgggaaattgcacttggatccctgaagacaggacaattgtgagcacgtctccgggttcacgcacagcaaaaaataagcatacataccttgtccttgtagtaggcgagcttccacaccatggacgatgtcgtcggggatgctgttactgactctgctcctccggtgatctcaaggttcttgaacttcagcgctgctatccttgaagagcttgctgaggcgcgagctgctgcagaacctgctggtagaagtattagccaagctagatgatgcatgttggcagcccttccgttttgagaggtcgacggactactcgaatggtgaatacacgatcgaatgacaggccttctaccgcgctttaactgcttgttccccgcttgagttttcagaaatgagctagggggcgcgaagtgcggggaggggagggctgagaaccaccaaatttgcgcgccttttaaagatctgacgtgggttgatgttcgggaaagtagtagtgatattatcactgctattatcactactagtggcgttttttatcgctactatagctatattactactatgaatcccagaccccagtgctatagtagtgctatagtagtagtaatattatcactactatcgctactactctgctgactactaccaagccctgtactggattggaactgtttgaaaacaacacaaatgcactccacgatgataggccaaaaagcgcttattgaagacatgtgattggctatggggtgattaggacctatagccggtcaaagtcagcggagctgctgcaggatgcgcgctggaggacagaggaggacaatttgcgttaggtacatgttgaaggagatgatcaccaaagtttgcaaaagtgatcgacgcgtacctgcgaggacggcggcaccgaagccattgtcgatgttgacgacacccactccaggcgagcacgcgttgagcattgtgagcaatggagctaggccgccgaacgccgctccgtagccaacgctcgtagggactgcgatcactggtgaagatgtgagaccgccctgtaagcagcacgaattgagtcagtaaaaatacggaactggaatgctgcagacaaacaagcgccatacgcaccacaacgccgggcaaggcgccgtccatgccagcaacgcaaattgcgacgtccgatgcccgcaggacgtgctggttgcgcagcaagcggtggatcccagccacacccacgtcgtaaagttgagtgaccttataatcagccagttctgtcaacagcagagtggttagtacgttaaaaaccttcatattgcacgcaggaaaggagttgaaggaagctaaagctctttaccaagtgtaacagcggcttcttcagcgacagggagatctgaagttcccgcgcagagcacgcatgcggtgggggtcttctaccaaaaaaaagttagcgtagctagtcgcaaatatgacaacttcgccattccacgagcagcatttaccttctcctgatcctcagtactttcctccttcttcgcggcgtccaaagattttgaggccaagatacgaggcacttcgtagtacgtcaaatgctgaccctgccaagccataccaagtatccatcgactgtcaaaacacaatcctttatcgcgacttcagcacctcccttctcagttcgtaccggcatcaacgcttgaatagcatccgcagcctccggcgtcacgcgcgaagccatgacattgtcctcgcccccgtcaatcatgaccttcatgatagccgccacctgctctggcgtcttgctctcggcatacacgacctccgggaaccccgtgcgcgcctcccgcttggtgtcgatctttgcaaaatcccccactgtctcgtactccgcagcggggccacagagctccgccgccgcttgaggtgagaccttcccctccgccactcgctgcagcagctccaggatcgactttttgtcctccgccagcggactcgacgaggtggatagtcccgcgatgcgggacttcggggcaacacattgtccaccgtttgcagcgactgcaaaacgtagcgaagacggacgacgtgcgcgcagaagagcaccagcgagcttcatgggtccgtggggcgggaggagcttaactttgatcagactgacacgccacgtcagactatccacactattgcaaaattcacattttgagctccctattgtcaaaattgtgcgtcgtgtgattgagctcctcgacgatggcgacgactgccacccccgcgtgcccccgctgctcgacactggagaaggagctagtggagcttcgagcgcagaacgaacagcttcaagcacagttgaaaaaggcccagacaccggatgagaccgttatcaagcctcaagaagacaagaccgaggaggattcaccggatacttcgacgtactcgccgttctcaagggcggaattgcagcgttacgggcggcaaatgctcgttaaagagttcggagtcgaggcgcaactcaagttgcgtgctgcgcgcgtgctgctgattggcgtcgggggacttgggtcaccagttgcaatgtacttggccgctatgggagtcgggacgttggctgtcgtggatggggaccatgtcgaccgtagcaatttgcaccgtcagattctccatgacgaacagggagcaaagcaacgagagaagaaggtggactcggccaagagacgactgcaagagatgaatccgttggttcactgcatcgtgtacccgacgcggttcactgctgccaacgctttggatcttgttggcgagtacgacgtcgtcgtcgacgcctcggacaacgtcgggactcgttatctcgttaatgacgcatgcgctcgccgacgcaagccgttggtatcgggaagcgcgctgggtctggagggacaagtgacggtgttcacatacaaggacgatggaagtgcaacgggatgctaccggtgcttgtatccgacaccgccgcgagttgcgatgagctgtgcggagaacggtgttatcggagttgtgcccggagtgatcggatgtcttcaagcaatggaaaccgtcaaggtcgtcacgggggtcggagagcccctcgatggtgtgcagtgcttctacgacgcgtacgacggacaatttcgtcgcttgaaaatcggcaagaagcggaatcctgactgtccgtcctgcggccaaggagccatcggctctgaagtgatgtcattggacgctgctctacttgttgaaggcacttgcaatgatggaaaagcggtggacgaccttggacctgagtttcgtatcagtggtgaggagttccagaaggtgcgcaaatctgttgaaggcgaaggcacgcaacgaaactatgtgttgctggacactcgtgcacaaacgcagttcaatatggtgcacttccccgaggcagtgaacatcccaacggctcagttgatgaagcaggacccctccaaagtcatcgcagttttgcatgatggagtctcaaaagctgctgctgcgtactccaaccgaacgttcgtgatctgtcgtcgaggcgtggactctgtcaaggtgacacgatggctgctccgcggtggcgttgagaacgtgttcaacatcaatggcggatacaccgaatacgcgaaagaaggcggcgtagacccgacgtttccgatgtattaaagcatgggaagtatagctgataaagcagcgttcatgagagatttgactggtactaaatcggggatccttatgatttcatatggcattggtaagggtataaatcggtgtaaggttaataaaatgggggttgcctcattacccgccagaaatacgacgagcgaccacttaccgccacgagctgagtgattcgcgtacctactaacgagaaatagcatcacgtgcattaaatacgcttctgtgagcttcgatgtgtactgctatctatttatcaagttctgtatttgcgctgtcatttctcgtcagcattagcgtttgtcggttttacgttaaatcggccaccgaatgccgtgtgggtgtcggacattcgggctgattagcatgcaaatcagccgtcccgggctttgtaagccgtgaagcagctaaatcagcttgccacatggcgttgtaggcacaactgaccgctctgtcaaatcagagtacaaatcttagtctgtcgatctaattaggaggtcggatttagcaaatcagacccgattaagcttaatcatctacttaatcaaccgatttatatcccaattagacaatctaatcggtttccacaatacatgtaagcctacgcgcaaagcaaaccctgtattttaagcgatcgatgatcgctgcatctaaaattttgctaagatttgggcccgtcgcatgacgtgcacgagtgcgggattgcagctctacgaaagcagcccttcgtgcatcgagacgtagtcgacaggagtgcgcgtgcgatggctgcgcttttcgtccgttggtggtgatacttcgtcgtgcgacgcagccacagtagtgggcgatggctggtccgacacgctcttggattcatcttccttcccctccttaccttcttcaccctcgccttcgtcctcttcctcacttccgtcttcattatcctcctcttcatcaggctcctcgtcgcttccttctttgacctcgaaggtttcatcctcttcgctgtcctcatcctttccagcaaacatgagctcgttgagctggcgatagtcgacatcggtgcgtttgcgcttcccacgaacaatcaaagccgcatcggcctccgagtcgccgccggtttggtcggtgtcgctgtcctccaccgcagcgcgattaatcgcagacatcgtcttgctgcgcgtcaggtgctccgaggacccgtcgcggtagtcaatgcgccagcgcgaatatcgtcctttagtcggtggctcatactcggccacgaccccaagaatcacttccccagtcttacgatcaatcttggccgctggctcacccacaaggttcagcttctgttggacaggctttacggggcggctaacactctttgaccgcgtcgatcgactgcgtaggatcggaaacaacgacaatgttagatacaagctgcttcactccaagtcccttgctgcaacgtactgattcaggtcgatgacgtcgtccttgctgaggtaaaccaagtcttgagcactttccgggacctcctcggccatctcctcttcttcgccgtctgcctctactgacacttcgtcatctgcgtcgctttctccctcctcgtcgtcctcatcatcgttgcaaacgaaatcttcatcgtcatcgtcgtcgttgtcagcaggggcagctccgctctcctcgcccgactgagcagcactgctcgcgtccgtcgttggttgctgctcagctgcagccagctccgggaaaaggtcgtcgacactttcgtacgtcgtaccgaagaccgaattgatcgacttaagacactcgaacacggccagacacacttcacagaaccaaggctcctcacctgccgggatattgacagtgagcacaatcggcgtctggcacttttgatggtacgcgcgatggcacccaacgctgtcgcacagcaggatgtcgttgtccgcttcggtgtccgtgctcccacagcgcgagcagtgcacttcttcgaacttggcgagcagtggcacttgcggttcattcgcgttcaatgccttcagctcgttcaaaccatcgataagagcacgttggcccttggcgatcttgcggtgctccgtctcaagctccttgttaggcttgagcttgtcacgactcgacttattccagccttcggcttcgtaagcctcaacgaaggcgagggggtacctcagtcgatgcgcctgaagatgaaaagcagtataggtcagaacttatcgactaactgtgccaatggtgttcagtacccttcatacctgggacttgatcttgttctccagccgcttgaactctgggcgagcaggcgtaggaggagcgggaggagcgttcccgtcagcatcaggactcacttccttgggcttccgcgatttccgcggcgtgtcggcgggcggcgagaatgccgtgggggtacgacgctcgcgttgctctcgcggctgcgccttgctgcagtgcgtgcacaataacgttgaagttagcggcgtgtatcaaagccgtccacaaaacagagtctgcaccaggcccatcgactcctactcgggaggtcgagagacctaaagcgtatctaacatcttttcgtacattgccggacggcgagcggaggccggtggcgcataggcgtcgtcgctgtcgctggacgagcgcgctttcttcctggtgcggggcatcgtcctcaacttggatgaacccgtctaggtggtgactagctggcgggttggttgacgagcctgtgcttctttatggctggactttggactgtcgacctgtctcgaaatataacctttttagtttgtacacttactgcggcgactaagaaaggctgacgacactgacaccccgagagtgccagttgtagcacaagagacaaagttaagttacctcttcgagtctgggcgtgcgtttggttgcggttgggtggggagggtgacggtagtgacgacgctcgagccaattgctgccgtcgaccacccgatactcaagtatcctccaagtcgagtggaatccaatggtgcgggcgactcggacgtgcgaatccaagttgctgccaagtctgcgcgggtgtcggctgtgtcgagtttcaggtggaggagggtgactcactcacctcacactttgggacagctagcttcctgcttgtttgttcgtccaaaacttactgctgattcagcgtgggcatacatatactgagggtgaatgtctttttctcattggttaaaaatgcattcggaaccctcttacgattggacgaaaataagtcgatcgatttcgccttcaaggggtgcagactgtcaagtgctgactcttgggctccgatacatggagtcgctcacggacgagcagcgcgcgctgttcgccgatggcggccagctggacgactacgaggtgctcaaacccatcggcaagggcaagttctcggtggttttcaaggccaagcggcgctgcgacggccaggcggtggcgctcaagaagattgccatcttcgacatgatgaacctcaaagctcgcgagaaaacgctcaaggaggtgcgtctggaagttgcgccaatgggtttgcactgcggaaaagttggtgatgagttgccaaaactgttttttatttgttgtgttgcaggtgcgtctggtgcagtcggtcagccacccgaacatcattcagtatctggatgcgttcgtgcagaataacgagctgtacattgccttcgagtgggcagaagcgggtgacctcaagcggcagatcaggaaagccaatgagaaaggggtgaggtttgacgaacgcaccatttggagatacttcacgcagctctgcggcgccattttgtacctgcaccaggcgcgtatcatgcaccgcgacctcaaaccggcgaacatatttttgacgttgaaaggagtggtgaaagtcggagaccttggcttggggcggtatttgagtgaaaacacagtcgaggctcgctcgaaggttggaaccccgctgtatatgtcaccggaggtgctgcgtggtgaaagttacgactggaagagcgacgtgtggtccatggggtgcatcttgtacgagctcgcaatgcttcggtcgccgtttaagtcagagggtttgaacctggtggggcttttccagaaaatcaataaagggtactacgaggagattccggaggtctacagtgaccatctgcgcggcctcgtcaagcggatgatctcgctcacggcgtctgaccgtccaagtgtgcaagaagtttgggatgcctgccgaacacgaccgcctagtgcagtattgcaggagcgaatgcgacggcatcaaggcggcactgagattaataacaacgatcctgcaacgaaagaaccggagacgcgctcgtctcgatcgcgaagcagtagaagcaagaaatcaccagaaaatgagaatccatcgcgaccttcatcttctggccagcagcaagaaactccacctcaatcacgacctccatcatctcagggggataccagtaatggtcagaccgaggaaatggttagaaggaggcatgctgaagcgcgaatggagttgatttttgagaagctgaagatcttgcggtatgaaaaggtgctcaagaagagcatttcacctacatacttttcgtctgacagccgaatgctaccgagagtggcgccacaagcccggttcgaagacatgcggatattatcacaatggttattatctctcttaggcggtggtgatttacatcttgatgatcagtacgaaagccctccaattgtggtagctcaaaagattcttttggcggctgagaaagttggtgtaccagaggtggcgcagcttagcgcccccgcgctaaccagcggtgttagcgtcgaagtatgcatcctgttggacgccctaactactgctgtcgtaagtggagaagagtattgcaccaccccgccagcatatccacgagagcccgtcgaaacgttagagtcgagcgatgcgttggatgttactgacgatgacggacagcagaatgccagtaccgacggggttggagaatcaacggcctcgctagataccgaagtcgacgacgttttctcgcggtggctggtggtgaaagaggagcaactgctttctgggctaaccgaggacgcagacaatggaaacgccatgattcataccgatattgacccggctgcttgggagcttgagcgtcgtcgcatgctcccgaaactgcaagctgttctgcaggataagcttcatcgccgcccagctgaaagctcgtggcgtgttcgattggaccaagtgcagacacatgctgggtcaatagtctcaggacaggatgatatgaagaacgaaattgccaagattcaagcggtaggtctcgacatcactgtaatatgccaaagttcgccctctcagcccctgactgcctcctattgatgctcgtatacctattcagagtcgtcacaagcaaacagatgaactggaacggtacgaaaagatgctgaacaatcgtttcctgcgggcgagacgtctgtatcatgagggcacgacgagattgtccaaggcacaaagcctgatgcaaactgctcaggtaagctaattatctacaactttagccatgatctactgctgatagtcttctcgattgcccaggagaatgtgaatcaagcgacggtggagattgcgaggttgcaggcagctcgatccgaacaagccagcgcgctgaacgctgccgacgcgcggctcaccgacaactccatgcttttagagcgcaagcgacaagttcgacatctcaaaaacgagaaccacgagctgggtctgaagctgcaagtgctgcaggactactggaaccgcaaacagcaacatgcaacccaatgtagccatcttgatcccgtttaacaattatcacaaatcacagattaatctgattctagccaatcggcgctcatctgagttgaactatcagccaatccccacgaatgtagccatatcgttccgtcgcaattctcctccgccccacatttcgagatcccgccgacgaccagcaccgagcagctccttccgcccgaccttcaatgcccccgcgcataacactagagctcaatcccaaccactacgaagctgaagctgaatccgattgcgagcacgatgagaccgggctgggcctggatctgctggagcaggccgagcccttcctcactttcgagagcatccagttcgacgcggactcgcgccttgcaacgttccagttccatttctgcggaggccgccgcttccaagccgcgatgagcttggctggtccattgcaaggcttggacgagacgtcgccggttctgcgcaatgcgttgctgcacattggactctgcatcctgccgtggttctggatgggctacaactgcaagtacattcggatcgaagcgggatacctcaacccggagcaggtgcgatgacgctaagagagatacgctgaactggtagttgtagctgagtgactggtgaattgctgggactggtggtgtaatctgcaggtgcacttttgggaagagttctaccagaacgtgctgagcgagtttctgtatctgcacgggctggaccgcgatcgcctgtacattatcgtggatgcccctgccagcgaggctcttccggtgctgccggataggaagctggaagaacagagcaaggccaaggtcttggttccattgtaagtgtgctgtcctggactgatcttgaaaagcttggtggttaacgctctggtttctttgaacttttggaatgcaggggcggtggcaaggactcgcttgtggtgtaccaactgttgtcctcgagtgacacgccttgtgcctggttgcacgtgggggatcgtccggaggagtttgagcgtagctggcggttcaaagaaatcgtcgaaatgacgcagaaccgcacggggggcactgcgttccgtttcgagcacaacatggatgacaagacttgggagcgcgaggttggaggtacgagataccaacccgccggccacccgtgggctgcgctcgttgcgttcgacagcgtgctagctgccattttgggtgacttcacgcacgtggctgtaggcaatgagcgcagcgcgaattacggcaacaacatcgtgcacgaaggtatcctggtgaaccaccagtacgacaagagcttcgactttgagacgcgcgcgcacgcgtacattcggaagtatctggttgaagatctgcactacttctctgcccttcagcacctatgggaggttcagatcgcgcgtacttttgcgagtcggtcgttggaaagctcggagaacttcttgcccgtctttttgagctgcaacgaggcccctgacggcgacaagtggtgctgcaagtgtgccaagtgcgcgtttgtgttcatcctcatgagcgcctggtgctcggaagcgcaacttgtggaaatctttggtgagaatctgtttgagaagcagtcgattttctccgacttcctctctctgctggacgaggaaggcgtgaagcccatggaatgtgttggcacggcttgcgagacgtggctgtcactgtacttggcgctgcgagtccacggcgagagcacgtttttgaaggcccatgaggaagagattcgacgaaagggagccgagctcatgcacctccttgacgactacaacagtgagcacttgctgccgcagttcttggagccaactctgcgccaacctattatggcactggaagcttaaagcaacgacgggtataccgcattcaacgtggcgtctatttcgtgttaatgttcgcgtagtaggaactaaagtctggaagaagcaagataatacaaaactatagggtcaccgtcgcaaggtactcggccgcctcgtcgtcaccaagcgcctgcgccacggagagagccgtctcgccatcgacgtccttgatcttggggtcgacacccttcgcaacgagcagcttgaccagctcaagaccggagcagccaaagaggcacgtctggccgatctcgttcagagcgttcaagtcaatcttgtcgcttccagccaggagctccacgacctcctgcatctcgaacatgacagccacgtgcagagcgcggtcgccgttcgagggcagagcgaagttgacgtccgcacccagagcgagcatctccttgatcacgctgatgtggccgaagcggcaggcctggaacagtgcgcagtcgtcgtcctccgcgtcctcgtcctcctcaccagcacccgcgcccaccgagggcgtggtgacgagcttcgtagcggactcaatggcgccgttcttcagcagcagcagcgccacagccgagtgctccgactcgacagccaggtacagcgggttggaggcgtccttagaggtgccgccgtagttgacgtcggccttgcgagccaccagctcctccgtcagctcgaggagtcccgagttggccgcctgcatcagcagcgtccatccgtggcggtccacgacagcgtccgggtccttgacgcccagacgctgcactagcgccatggccaccttgccaaagccagtcatgagcttctcggcctcagcctccatctcctccaggtccttctccgcctggccctgctcctggtcctccccgtcctcctcgaagccctcctggatgcccagcacgtgcacgaacgcctcgtactcctgctgccacgtgtgcagccagtccatgaggtacacgagcggcgacttgtccccgaggtcgcccgcggtggccaggaactgctccacgtcgccggcgatcacgctcttgcgcaccgcgtccagcgtctcgtccacctggacgccctcgtccccgagcgacagcgtcgccaccgacaggtcgtctcctccggccatgcttgaactgcttgagttgcgttgagcttgtcgtcgattaatcgccaaatgagttgacacgcgagcggtgattggatggcccacatggcttcgctttggatggcgctgattggctgcagacgtacgtggccacgatcgatcgacaacatgttgaagccactttgtgcaacgcgagcgagtactgtgctcgactgtcgaatttgctaggctacgaagcgaggccaaagtgctagctccgtgaacaacagtttgtgcgtgggcctcgatcaatgctgatactatcatcgtatatctggcgtctcgcttgggagttaaaagcttagaaccattggcttgtcggatccgtttcttgcttcaagagcagccacaatattgcccttctttccgtatggcttctgccatcaccaaatggatatgttcgtagtagcgcgtgctcgaagagccatatcgtgtgatgcctgccgcaagaacaaactggatcaaagcaggttgttgcaatcttgggtctgtctcgtagctgatcccatttcttgaagcacactaccaaaggttagcacctctcacaataatagatcgcgacttggtagcaggcaacgcgaaccaaaggtactgttaaagttactgggaaatactaccgctctgttccaagaatatttgggttttacatttaatatcctttatatacacagcagcatgctgagaagtatgaaagcccagcaggagaatcacggtccatgcttcaccaggtctagcagtgttgcagtggtagccatttccgatgatgtagtcggagccaaatctcctccactaagtacgttcatcgcgccatacaaaaatcaagtcaatcatagctcggcgaaacgtcttggccaattcaagctcaagcccacgcatctctccgctgggctgccaccttcgcctcgccgcgtcatgagtggatccgcggtgctcgaagctccctccacacccgcgtctctgtctcctacgcgcgccgcgctggccagcgcatccgagaaggcggcggccaagcccggccaagtgatcgtcggcccgctgcgcatccaaggtacgaattaggcgaggaattggaggctaggagtgcgtttttgacagctgacgcatttttgacagtcttacaagcgatcgacttaccgacaccgagacctgtcgaaaatgccacactgacttcggcttcatcatggctacatttacctggtcgacggacgtctcagcaccagaatgcaccaggcaaagcccagcacgaagcagtgcccgatatgatctgtgtgctgctacaagcagcgaaaaacaatggaatctatgcaacagaagcgcgaccttgggccagcgccatctgctgggacgaagtgagtagttgacgctgtcaaaaatgcagaattgtgtcgattaatggctaatgccgtgggtattgcaggaattttacatggagcaggtgagttccagtgacgagttggtgctgttttgtgtggatcgagccagggatgagacccacgcgagtctaccacttgaaggggatgtcagttcttgcccagggttcatcggaaaaggtaagagcgctacgttgcaaggtgtcgaaggatgttgttaacttactcggttgtgtattggaactttattgaatgttacagtgagtttaccgcttacgcgtctaccggaagggcaggaggtggagcagtggtatccccttgtgtcgaaggagtcgtcatctagtctgcgcactgcgctgcgggtgtcactttgcttcgtgcctaatggaattctgacgactcggtcacagagccccgagcgacgaagggtaacgcctacgtcagtgctgatatcgtccccagcaaccgagatttcattagcttcacccgtgaccaaaccgttgccaagtcccgactcggtgaattctgctgctataacggtgaaatcgggtgttatcgactatgtgatcgtggtggggacagcagcaggaaatgacgttccgacaagcctagatgaggcccaagtacgcttccgatatccacttacagatcgactcgacttccctctgccgacaaaaatcgaatggttttgcttccctggtggacctgaaattgttactcaagcggaacgcccgaagacgaagctgttttctttcgtgcttgtgggtggtgatgacggactgtgcaggtcttatgtcgtgtgtcttgtggtgtatcatcgccgagcaaagagcaaggctgctgaggtgaacgaatggcattccacctgcgtggcatttttaacgcgtatccccgtgatcgaagacgtgacaacgtgccttttgtcggtggcacacgcgtggatggaagcaaatgaaagagaagacaacgctgccgaagccactgacaaagatcgccgagcagctgtccgacagcaactggttagcctttgtcacggcatcacgctccctgttcgcggtgtatttggcgttcaatttgacatcaacaacctgaaagtgcggcttatggttccttctatgacatccatctacatgatgaaagaagcggtgcgaccggagcttcgtcgttcggcatcggcccagggtcctcagatatcaccggtgaaagttcgaagcttcatcgcaatccaacagggatttcagccgcttgtgtactctctcgagccgatattccagctctttgacatcaagactatcattcatctcgtgacgttggtgctttgtgaataccgaattcttttacactcaacgcagcagtccttgttgtgtcccgtcgcggaaggactttgtgctctcatttacccgttccggtggcagcatccatacgtgccaattctacctcgagtgctatcggagtatcttcaagctcctctaccgtacatcttggggattcacacaagctggctgcaaagcatgctggaaactggccgtcctgaacacctcgtggttgtcgacatcgatcgcgggactattcaattgcaagaatctggcggacctgtgctgcctcacaagttggcaaaaggtctacacaagcagctaaagattatcttacatccttctttgtatggcgaagctgagacgaattgtcggaccagcatcgaagaggagcataatactgctgtcgatttggaggagttaaatcaaacaattggtgaagaacaacgtgatgtcgtggagtggggacctgaaaccgaaaagcaagtccgaatggagtttgtatgtttcctcgctgcgctggtgaggggctaccgtgaatgtcttttcttcgtgaaccagaagctcccagtgtttaacaagcgccgcttctttgagagtgattcgacagacaacgaggtggtgccactagtgactcgactgttttgtacgcagtcctttcaagcgtttctcgagagccacagctcggctgaactcagtgttttccattcggtgtacctgaccctttgtcgtgggccgaaggagatgcagtggtcccagtctgtcagggcgctcacaacgtcgaaaatccagcattcttttctggatacaggtccggcaagaacagatatccccgtcctcgtgatagatgaagctaacaagcacagagaggaggatgacaatggcaacggcagtagcgatattgcacctgtaccacaaccgaaagcagtcccgtcagcagtaaatgatgcggatgtgagcgtgaccggaaaggaaacgacgaaaatcctgggcgagaaaatcgaggcgttgctaaatacagagaggaatatgaattgggacccatttgcactggagtcaagcgatgttgatacgctggcagctacgccatcccagccaccggtcaagatgaatcacgaacttctggcgcggaaacttggcgtggagcctaaattgctgaaggcaaatgctcatctattgcaaaacccacatcaagtgaatcagtaccgactccatcttgatagcactatcgctgcggcattggcggggtcggctgggcctggcggtcgattcctgtcgtcagaagacgaacggatcgagcaaatgttgcacaagtgcttgactgcggttttcacatccgacgacacattgagtgaagaagaagttcgggttcgtaatgtggaatgcttgttattgacaatagcttgtgccttactctgttctgctgcctttaggcttgcgagacccacttcaaaagcgcccatgcccgtgatctatttgtcttgatcttgatgcagccgagcaaccagtacgtcgagagcgtgaacggttctcctaaatcgagcggtacaaagagctcttcagcttggtacaacccgaaaggatcgggaagctgtatcggctcagctggattccagttactggcgaggttaacgtcggcgttaatgaaccaatgcgcggttcacgaggactactccacagcacgaggcatcttacaagtagctacccagtattaccagtacgtcgaagacaagcacagcggcatcggatttggtaagaattctctacgaattgttatgcgtttacaagattttctcacactgacacacttgttttgttgtgtattgtagccaagaaggagtatttggtgacgccattacgtttgctgccgatctgtcgctcattagacttatggcagcacgccttcacgtgtgagattgatgctgtcaaccaggcagatcccaccgaatccgacgaagaggctgtggagactgtgggggacgaactgttcttttcagttattgggagtctcatgtacgacatgctcaacttcgaagtgccgctccagaaggtgctgacgttcgtgacagtcatgtgttccacctaccaaaagggtccggacttgttggacacgctcaagcagctcgcggagaacgtgtatcgggcgctcgatatgtccaaagacatcaagccttcgccccccaaggacgccgtccagcaccgaattaaccataagccgacaaacaaccacgtggctgccccctcctcccggaccgagttaccgccgaagccttcaactagaacaaccggcgacacaccgtcgacaccagggatggtcttcgctgaaagtcctgtgttatcgcgggagtacgacctcaatacggtgattcgccgtaagatgtccgttcgagagatgcctcagtccagacaaggcaaaaccaagctcggaagcctgaacgatgaccccacgggtaacagcaaccagcacgcagccgactggatgagcagaacgccgccaacgcgcagacgaaggtccagcgccgtgttcccgagcgccgtgctgaccagttcgggctctcctgtactgagtttggcgaccgatggtggtcgtgcagcctgtgggatggccgacgcccgtgtgaacgtcgtggatatcgatccgtccgagtacgaaaagggcttgaggctggacggccactctgacgctgtggtggctgtgcagatgcggggtaacgctctgatctctgggtcgcgggaccatacgctgcgtgcttgggatctacgtgccacgcccaaaaagcggcacatgttcgcgttcttctcactaccgtacgctaccagcaacacgttgaattcgaccgaggacagcgaggttgatggagcgtcggtatcgaagcgcagcctggtgatgcgtggccacttggatgcgatcacgtgcatggagcttgggcatcaactcggcgccggtcgctctcttttggcgtctggttccgatgacggcactgttcggctctgggagactacacgggagaccagcgtggctcttcttagtggtcataagggcactggcaagcctgcgaacaatggtggagttagctgtctgcgtttgctggctagtgacgacgacttggcgttggggtatcgccgacgcacgctgcagatctgggacctcgccgtttgtaagctgaaagtcaacgtgcaggcgcataacgctggagtacgggacctacaagtgtcgggcactcgactggtgacggctgggaatgatcggatcgtgaaggtttgggatacgggattccgtggtgtcggtggtgcattgatgcccgttcaagagttgtgtgaacatggtggccccgtgcagtgcgtgagcctcggaggacctgcagacccgaacatctgcacggctgccgctgacggcctcgtccgcgtgtgggaccttcggttcgtgcagcgaggtcctcgactaacgcttcgaggccacaccggcccagtaacgcggctgcagcgtgacttcacgaagcttgtgtctgctggagaggacgggtggctccgagtctgggatatgcactctggggtgtgtctacgcgaaaagcaggcgcacgcttccggtgtcacgtgccttgaaatgcacgactcgctcgtgtactctggctcatgggacggctcggtgcgcgtctgggatatcgagaacgtcagtagttcaggccaagctgctgtctaagtggtgacttggctcaaatctatagacagatccgctacaataagcggcagttatagtacaacaacaaccaagcggcacctcgctcgcagggaaagatgccgagagtgacggaggcgccctcgcgcttgcattcgccagcgtcatggtcaccactgtcgtcaccgtcgtcctcgttgccaagcgtgtgctctccagggtcagcgaatctgtcacgtgatagcagacgcagcaccgaggccagaccccagcaagcgaagacgaagaaggaggagaagcccaaactcgaccgaacaagctctgggaaggtgaatgatcgccacaagccagctacagccaccacgacgtatgcaaatgctacggatgaagagactcgctcgagcagttaccgcggtcgcgacaacagagtcgaacacatgcaagcggtcgatagatcgagtgagaatgataggagctcttggccagtccttgtggctgtaaggtgtcgtccgaggaaacgacagcgagctggaggacgctttgccgctgtacttcgtggggacgacgagatctggcgatctggactgctagactcgagctacagcagcagtgacagcagcagcgatggaagaggaagcaactaccgttcgtcctccagcagcgttcagcgcggtgtctttgaatattctgcctgcagagattatgactacgcagcgacgtacgactccacgctgccgcctccgcgtttgcagcgtccacgccgattgtacgtgcaggctccttcacatacgtctcaaagtgcgtctggtcggcggagctttgatttcgacttcattttcccgccctggaagaaacaacgggacgtgtacgaagcttgtgtggaggcgcagattcgccacgtcctcgaggctcaacaacggagacagcagcagcacgcaacggttgtagcgtacggacaaactggcacggggaaaacgtacactatgggcatgctaagcgactttcgagatgacaaggagcaggggctgatcccccgcgcgttgtctcaagtgctggagtttgctgctggtgaggagactgaggacgattcaatggagacggtggtgacgttgtcgttcttgcagatatacctcgaaacggttcaagatcttctcgccttgcctgggtccagtgcaagtgctgaccgagcgaaaccgtggagaaagaatgattcacgtcgagattgcagtgcagctagcagtgacctccctgtacggcaaggacgcgacggaacattctacgtcacaggcttgaacgagtacgagatatcgtcggtggaggacgcccacgcgttactggagctagcgatgcgtaaccgggtcttggcttcgactgcaaagaacaaaacctcctctcgtagtcatacactgctcaccatctcgatcaagcgtcggcgtcgaggcgctaagagcaggtaccctagcagtgatgacgaagatgagaactgcgatgcaggcggcagctttgacgaatacgatgatcccaagcaagcttcgacgatctcgttcgtggatttggccggctcggaacgtgtggacggtgctttgcatttccttcgagccacgcgtgcgcggcaggaacagcggattcgggaggcgaagttcattaaccggtcgttgagtgcgcttggaggtgtcatcgcggcgttggcgcaaccaaagaatggcacgcctgggtcttcctctgcgcacgttttggctcgtttacgctcgtccttgtcggataggatgcagcctccagtggagagtgatcaaagccaaccgcacattcggtttcgagactcacaactgactaaactactccaaggtcgtctcatgggaggtcgtggacggctgctattgatcgcgacggtggatgatcagcctaagaatgtctcggagacgctgtcaacgcttaaatttgccgcacaatgccgacgtgtggagcttcaaccaggctcaaagcttcggggggatagttctgctcgcttgcgacgacaaaagtctctgctggatcaggtgttcaacgacatgaagatcatgcacgagaaccgggaagcagcgctgcatgtgagtggccggcttcgtgtccgacttactcaacgtcctactaacaaactcactgtttactggctctgcagagcgaataccaagcgcgaatcgaggttctggagcgagaactagaagcagctcgagcgacggctgcatccccattaccatcttcggatcaagacgcatccagtatacacctcgcttcctacacggcgttgtgctcactggtggacacagtttgctccgatggagacggtgacaaaacccacccaaggattgccgatttccagagtgaaaaagacatgctcgagtacgtcgctgggctctacgccaagctgaaagacgctctactcgctcaggagcagcagcagcgactcaatcaggagcaacgcgggccagagggcatggaccaagacactacctccaaacaactcgttgcagtgaacgatgacgctgctccgcgcgaatctattcgaacagcttcagtcccgactgccatcccctcgagcactaggagaccacgcagtagcatgcaactatcagctgaacaagaagccgagttccgcgccgttgcacggcatctaatatccactcgagcactcgactcgttcgttgtcagttcatctgacgaggaagcgtaagatgttactacgaaacatgacaatgatcctgaccatgatcgtcatcatgttgtcattgctgttattgtttgttgctgtttgatgtgcatgagttccttcacccgcctctcgttctttgcatggagttgtttgttcgtatgttgcaagcgcggcgaacgttgcctcgctctcgacgtgcgggcacgtcgacgcgccgtcacacggacgagcgcgaagcgatgagcgtcatggcggcgcctctcgggatacgcagcgagctctgcaggttggacaggcactgctcgtgcaggtagtcgcgcagcagcgtcttgagcgagcggcaggcgaactggtagagctgctggtagctctcaggcggcgtggcgagctgcgccggcgacacgtggaactcctgcagacacaggttgagccacagctcgtcgtccttgctcaggcggcgccacgagcggcacacgctgcgcgcggcgcagagcgacggcccgtccaggaagctcagcaccgcgtgcacgttctcgtcgcacgtgaagtccaagaggctcagcggacgcagcgcgggggtctccgctgacggaatggggaggaggcaccgcgcgcgcagccactcggccaccgcgcgagcctcgggcgacagggcgccacccacgggggcgaccagtgggtggaggataatggcgcgagatgtaggggccattggcattggcgttaggcagctacaggcaaggggccgcggctaggagctcgagctcgagggacgcgatgtcgaagttgaaagggtaaaagataacacgtcctaatagacgtcctaagatgtcctattgtcctaacaaatgcggtatattacttgcagtttgctcataaacggtaccaaaaattaggacaacacagctcgttttaggacgaacgggctggttaggagctgtcctaaaggacagccacgattcacttaccgaaatctgtcctaataggacaacaacaattcacctaaatgaggatctgtcctattaggacacttagtcgagtaataaccgagagctgtcctactaggacacttaactgcctagaactggcagttgtcctattaggacactttgttgactataactgggagctgtcctattaggacaaatggaattttttggcaactcgttagcaagggctctcgttgaagcaggactgcattatcagcgtctgaacaccgtactatcctacttaaagtccgcatagccagctgggatgcctggcactactggcggagcatgctgcggagctgtctggagtcccttcttgatgtcgtcaatgcgctggagatagcgggctgcttcttgcttggtgccttcaatgaaggtaagcaggctagggtgtgtacccactcgcgacgcgaagtcacgattgtacttttctagcggattgttggtgcggttaacgatgtcaacaccgcaccgcaccatttcatgaacgttccaggtcgtgacatcaaatcgctgcgtccaggtcttgaggaaatacttccaaaaagtattccattttgttttcgcgccggtctcgtcgacaatactcctcacgtacctcacaccctacaacgcagccatatatcagaataggtcagacacaaaaaattggtcacccaaaaaattgtccgcaccttttcagtgatttggtcctccgggataaccgtgagagtgtcgagctttcctgggctgagagcgtccttgatttggtcttcgggtagccgcagctcaagcattttccgacggagggcctgtttccagtggaacaggcacccaacgaggttcgcagtcggaaattgctccagcacagcgttgataagggcggactcaaagtcacccgtgacatgttcgggctccagctggcggttgctcaggatcacgagctcgttgagaacccgccagtacgtttcttgggacttgccttgcaccagtacatagcaaacaggcacgtagaggtcgacagaaggctcgaaagccatcacaatcagacactgactgaacggcttaggaaccaccgcaaatgttccgtcaatgaacagcgtgatcttcgggtaccgtagaattcgagccaagtcgggatgggccagtccgatcagacgttgcattccggtgcccgcggcggtggggtggaccacgctgaactgaagaaaggccctcgcatccatgtcactcacgcaccgaacagcttgggtcagaatggcttcaaagacatcaccgccagagcaatccttgcgtgtgtgcttgatgatagagacggccggtttcgcagggatgatcttgagcgcaataccttctccgccgtagcgaagcttgagatcgtcgtacacctcttgccacaggaccgccggtggggttgacatcttggtgatgctagagcgctggagctccactctcatctccttgcgcacgtccaccacttctggcttgggctcatccttacagctgtgcacactcttctcggtgacgacggctcctcctcggacaatcagtcttgccttgcatccctcacgaaacttcttgcagctgtagtagatcgtgtttgtttccgggcatgtgcgcttaacgcagaatgaatacccaccgtggtccatgacaagaaggttgggctctcacacttaggctgcaaaaagtgaaattgctggcagcactgcactgtgggggtctgacattcgacgagtggctaggatgagctaattacgcgtaaataacgttgcgaacgctctaaattacgcgtaccaaacattgtggtcaccaataaaacgcgtaatattcataaaactaggttttaggacagctcgtaggacgtaatttattatattctgttacgaaggattatacgagttttaggacatctcacggtaattttcgagagttttttaggacaattaggacactttaggaatcgttttaggacgtgtttccgacaccgagagtgatcggcagcactgtacagtagtgtatttggttaacgtcgtcgcgaagataagtgtaaagttcgagcaacattagagcaccattctagtaacatatgaaagggcgtttgataaaactgctcgcagcaccacgccgataatggagcgtggggcagatgtcgaagccatcgtggacttgatggagagcgagttggggccttcttctagaaaacaagattcttcagcccgtgcgaaattcaacaccttcttgaaaaaacacgtagacaccaacctgactatggagacgctgagggcagcacaggtcactaaggaaatgcttggtaagctccttacctttctgttcaatgatcctgacatccactggcaaacatcgatgaactatctgagctctatcaagagacaactggaggagaaaacgggaacggacctgttccgcagtgaccccgagtggtatcggcgttgccgacgccatttgcaaaagcaatatctcatgcttgccatctcggaaggcaaaaagctgaagaaccaagctccacccatgacaattgatgatcttcgctcaatatcaaccatactatttctcaaaaacgataagaaggcgctactcgaccgcactcttcttaacaaccagtggcttgcaattggtcgtagctccgacgtaggaatgctacactttacggacttgcactggcatggtagttttcttctcattgatctgacacggtacgtgcatatactttggctttagcattgtaataagtaattgacctgtgtgctgcttcaatagcaccaaggtgcagcagcaacagactatctcaattttttgctctccgatttgctggagcatcgatccctttcacacgttggcttctcagctggttgctgacccatacaatacctcgccgcgtgtgttctcgcaagtgactgaagctacaacagacgagcgtgtggctgcatacattaatcgagtgttagaatcggtgtcagtacgacacaaagcgagagctgacgcaaagcctacagtcacactcagcgcgtcgaggtggcgcagcgcatgcaagctccaacgctagcgtcaacctggctgatttggtccaccgggggctctggtccatggatggatttgctaccttactcgaatacatatcgccgacgacggctagcgaccagaagtttatccaagtgtacacgagccgccaaatgtaaccactatcttcggccgagttttgatgttgtgcaggggccgaagttaaggcgaagataggcgatacagtatatgaatctaaactcttgcgagcaaaagatctgataccgtacaaattccaaatgtgcataaaacgtcgtcgggtccagtactgtacttacccgttgacccatctcgtgtgtaccacatgaccctaatattttgaaggtttgaattgcgtcgtccaagagctccagtcgcgggcaagccgagtgccacgaggtcttatcattgatctgttgatcgatggccgtcatgtcgccccaagtgccctcgggctccttcctgtccccctcgcgcgccggcggcgcccttaagaagacgaagcgctcgtcggccatgggtgacaagccccctgcgactccgggcagcgccaccgtcggccgcaagcgcaagagcctcagcagcagcacccccagcacgcaggccagcagcgcggcctccacgcccctgtccaacaagaagaggaagcgcctgtccatcggcacgcccggcaaggtcacgcccctcacgggcgtgcgcgagaaggacgtggagcggaagttcacagagcacaccgtgtcggacgtgtacagggccatccgcaagcagacgggcagcctgggaggcaacgccgccggcggagccatctacggagagatcacccaggcctcgttccagcgcgtggtcgactacctcaaggaaaactgcgagctgtccacctccagccgcttcttggacgtgggctccggtctgggtaagcccaactttcacgtggctgtggacccgggtgtcgaggtgtcgtacggcatcgagctcgaggagctgcgctggcacttgtcgctgcacaacctgcgcagcgttctgtcgctcgactcgcagaagaacaagtgcctcgccacggtgttcacggcgggggacatcacccacgcgcacacgttcgagccgttttcgcacgtgtacagctttgacgtcggcttcccgcccgacgtgatggacaagatggccgacatgttcaaccgcagcacggcacggtactttgtcagcttccactcgccccggaaggttgtggacgcgtacggcttctcggtggagaatattggacgagtggcgacgtcgatggctggctccagtgaaggccaccagtgctacttctaccggcgtgtggccccgagtgacggtgagagcgagccggagatcgaggtgaagcctgaggagatgtccccgttgagcggaggaagtggccagccgttgaccgtggacccgctcttcaggaaaggtatcgagctgcttaacaacggccgtgaaggcatgctcgactggatctccgactttttcggccaggaagtgtacgcggggcgtacgcgtcggcaaaagcgcatcctacgcgagcgcccgattgagtcctactaccgtacggtcaagaaatcgtacgctactacgacttcgaaggattctccgcggaagaccgccaaggcgacgcggacgacgaagcgcaagatcaaccttcgcgcctgagctcgtgttgatgtttataggctgctcctgctcttttgtatcgcaggcccaagcaagacaaacaagcattactcgagtacaagaaacaccggtgtagtagttgatatacatgggaggaatcaagcaaacaagcacacagacagatcgaataggaatacaagctgcatacatgcatattacgctctatagccttcaagtgtgtgtgtgtgtgtatctaccttctcctcggatttattccgtctcgcgactcgcctcgactgactcaacgaagagcttcttctgcagcggcgagaagatgtcgcccccggcgtggatgcaggagattaaataggtcacatccttgctctcgaagcgctcctcctggcggaactggtccagttcatcgccgaacgccgtcgtgaactcctccatgtacagctgccggaactcgttttgcactgcagcatccaccgtggccgattcactggccagatggccctgcagttcgtgctccgccgacgccagcagctcgtggctggcgcgcgcggtcttgcggacgacgccaaggcgcgcgtacttcttggcggcgtcctcggcctcgtcgccggccgccacgaggtcctgcagcagcaacgtggtggcctcgtcctcttcagtgtcttcctcactgtccatcgactcgtcctcgtcctcgtcctcctgctggctgtggtcgtacgcgtccttcagcgtcttctgcagcttggagagggctgcagacgcctccaagctcttggcaatgagctctgcacagcgcacgctcttgtcggtggcggcggccagcagcttctgtctctgggcgtcgtccacggcgtcgttcaccgctgcagaagcgtcctccactcgcgcgcacactccagtagaagcctggaacgcatcttcgcccagagcagcgatgaggcggtcgtagcgcgccgcgagctgcgcagccttgtcacccgaggcgtccatggtgttgaatggctggcgatggtaaggttcgacgttcgcagagtattgagggctgaacaaagtacgatacagaagtactgaattacgataaaaacgaaaattacgtccatctgaaatggacatttattttagatcttatgactagactacccgctcgccatgttggggctgacggcagtgtctccgtacttctacacgagacgccgagtagagcgcaactctagcacatccattttgtccaacttgccttgtcggaacttcttcgcagaagcagcagcagcagtacatgtagcagcaacaagttgcgacaagggcaacgggagacagcttcgctttcaaaacaacttcgtgttaacaaaattatatactaacatgtattaagtaccaaacaaaacaaactttaccggcaaaagcagcagtacttgctgcaaacctcttgctcgcctccattcacctttcgaagcttcagcccttgtcctgcaagaagcgagcaaacaaacgctccctctcctcgctttgcgtcaccaccagcctcatccgctcttcagcatctgcacccgccttcacgaggagcttcaaatggtcttcggcgaccttggctccgctcgaggtgttcgcttgctgggcaatcgcgtcatggacgggctttcactgcttgcggtgagcctccatcgtgagtgcctcgacggtgttgacttgttcacagagcaccttggacaccttcaccagaactggttcgtcgtcgtccgaagtgtcctcctcgccctcctcgctctcgtcttcagtgttgtcggttgcaagagttgagcaagcgtctgcgtctgcctcctcgtcttcggacgcttgagtcgaagctgcctccgccagcaccccgagcttccgggcgcggaccttgtcaagcgtccgaaatgcggtttgactcaaactcagcagcacctcgggctctgcgcagcgtcgtgaggcctcgcgtcgacaggcctccgtgagctcgaaccaggtagtccaggagccgtagccatttgcgacgaactgacgggctgtcagcaccgcgcgagtcgccgcttcaactgcatcgcaggaccgagcgctgccgcctagccgcacaaagctcggatggagcttcgacgcgcactttggggactggagagcaggaaagccaagatcttcaatagcgcgagttagcaggtccagctcacgtcgagtccagcgaggctcacacccacgtagaacgcgcccaagcgctgcagacacctctcggtcaagcttaacgttgctacggaactgcgccacgagcctcttccacttcgacgccgtcgccagctgcgttcgtctcgtgctgtgggccagcttcacgaagttgtcatggatagcggttttcattgcaggcgaggggtggaccaacgattcgtgagggtgcgcatacaacgcattttcgcacgcagcaatgagcaccaagtgctccgagcgtgcccagcttggcatggtgcgaggaaactgggaactggacgcagagaaaaagccaaccagcacctcgtccctgagcggtggtatattgagcgcaatgggcacctttttgttcaacactatgggaaaaactttcattctttgccgctgcaacttgccgctcgctaccgaatgatcaaaccaactagcactaaacgacgtccagtacttgctggttgcacttgctcaactacttttacttgttcatctttctcgtgcgtctccagcctccgtgcgccaaacttccaatacatcgacctctctcctcttcatccggaccccacaactcgtcatcaaacccattatcttccccgagttcccatgtcagcgtggatgccacgactcatacggtagcatcttcaacaccgcgactgggctcctcgttctgtcgcgccaccagcatctgcatcagcttggatcgaacggtgtcttcgcgcttccgcatccgtgctcgtcacccttccttgcatactgaactgctagctggttgaagtgtaatgcaagcacaacaccaccggcaaaaccaccggtccaagcaactcctccttacgaaagcctagcattttcctcgatttggttgtccaccactcgtccgaattcctgcagagcaatagctctctttgtcagcaaacgatcgaaacgcgccccaatctccctctgtctcttggtcgcagtagcgtcatcgaggataccatttacaagcttccgctgttgcttgtgggtctccactgcgcaagaatgcatctctttcatagtgcgtgcaacgactcgctgcactacagcatcgtgaagctcgccatccttcgccttctcagctgcgcgcacagggtgctcccccgtaccagaacgtggttcacttccacgcatatccgatccacgttgttgggcaccatttgatggttcggcaacagtgttagaggtctctccgctgcgagctgcgacttgatccagcagccggaaggcttcttcactcatgcgcagaaggataccacgatacatggacggacatttgcgtgctagctcaagccggcgggcttccgacagcgcaagccatgagctccaagaacggcggatcaatacaaaacgccttgccttgagcacggattgacttgcggcttcaattgcacctcgcgttcggcgctggccaccacccagagccaagagctctggataaactttgctcaccagcttcgctggacatctgcgagcttggttcgccaaggcgcgacagagcaactccagctcctctcatgtccacggcgctcggctaccagtagtcttctttgaacgcgccatttttcacaatgagcacgaatctcgatcagccctgagaaaggagagaaacgcactgcaaccggcgggtttctttgtattagcggcatactaacggtagtatcgacggaagcaacgccatccgcctctaaagcagtaatatgctacgtaagttgaaatggacaaccaagaacactatcttacgtactaccttagtcggagatatccgctcaaccatttcagtcaaaactacactcacttgcgccagccgcctcacttgtccatcttccatcagcgcctcgcaggaaaccgcaagatcaaaaagccctctgccttcgcatctcaacaccaaagcaattgcctccccaccaagcaggaggcaccatagatcgccttccactggctcacgttcctaactcgggtcaaaccgtgcattcgtcattgtcgatcgtggagttccattacccccgccgagcccacgccctggtcgagctcttcatctgggcgttcagaaaggagtcgcgctgcaccaaagtatccaagtgctgagccagatgcaagtcgaatggggtgacatcgccatcaccaactgctgcagcgtcggcggcttgttccagtaagatatctctggcagcttcacctggtcaagcccacagattcgcgttcacactgacgacctccaccggtcaacacctctgcacttgtcgcgccatcattcgaatcatgcggtgttgccgccatcgagttatcaccaacggccccctgcggctcactctcgctagcgggttcgcgttcttcaccagtgctcgcttcttcctccatcgtttcgtcacttggttcttgctgcatggtcgctgaggagttggcaacgctaagctgcgacccgccctcaggttcgagctcttcttggctgggcatttcttcctccatgatattgttatctggtccctgcaagggtgcaacttgcatactcgactgagcctcaccctgatggactcctggatctgcctcttgattgcccagcacgccctcaccctcggtatctctgctcgcgtcccgcgatacataagatgctttgtccgaaagcgctgccgcttcatccagcgaacgaaacatagcttcgttcatgcgcggcaacaggaacttgtactccttgccacagtgctgcgaccgattgcgacgatccatgtcggacaacaacagccacgaactccaggaaccgatcgccaacacaaactctcttgccttcagcatcagtctaaacattgtcgtcatcgcctcttgggttcgtccagtatcgccacccagctcaagatacttccaacacagtttctttccgacgccgggggatcttcccgatccagcacgagagcgaacatccacgtaggccctcacaagccgctcaagctctgccaccgtccagacagccccactagacagcagttgcgtatctattggggtgactccatccagtaacgtcgcgtgcttttgagcaagcgtcgacaatgcttcatgaagcttcttgccaccaccggctctgcgcggttgcttctgacgtttacgcgttgccccggcgcgttgactcagttgctgcgtggacttccacctaacgcaagacttcgcaagctgcttcaacttggtggttgtagctctctcgcttcgctttgagctgccgctgagcgtgacaaagtaaccatgaacactgtcgaggaacggacgagaaggctcggctaacgactcgcttgggtgtacgcgtagtgcatgctcgcacgcagttaccagcagattctgctccttgagcgtccagttcatcttgttgcaatttccgacatgaacgctcaatggtaaatacgatgtggtcttgttacagttggttactttagtccacgagcacgtccaggaaatctccgaaggcgttgaagagcgaagcagcctcttcactatcacacactcgagttaatgaggtgagaaaggggttgagctcctcgtccgaggacgaactgctgcttctttcgcgctcgaacgtctcctccgcgagtaccacggggctatgcgtcgaagcctcctcctcggcttcaacaagctcgaaccgtgggctgtcatcttctccttccgaatctccagcgtccgagggccctttcccagttacggcgtgcgagacaccatcggccacttcatcagacacgtctgcaacgagtgcagcggcatccagcagctcgtcgaacgacggtagcacgctgtacgcctccttcatcacgtgcaccaccttggtaatgcccgtagctgcacccacggactccccagcgtggcggtagttctctttatccatcgattcatgaaggacatctcgacagagcaagaacccgtcgtgtacttcttcgctgttgacagtttcgtaggcccacttgagcaggtagaacgcattctgcggccccaacagcttcaccagcatcttcacagctgcacgggtttcattgacagcatcctcctcagagaagcactgctgcactgcaggcaccagcgccttcagcatccggtaggacggcactgcaatagcatgactcaacacgctcacagacgcattgccggtgacgtccatgccctgccacacagcgttcgacactgatggcgggatcacgtagcttaccgtcctcacggaagctcctacagctccagaaatagtcgacgccgtgaacgatgccgtggacaccgctccgtgtgtgatgcctctggccacatgcattcccgttctcgccacgacccccgtggtcgccaccaccgccgacgtggccaatgcatgggacgtcgacacagcgccagaaatcttccggccgctgtaagttgccacgcgcgtggggatcgccacggctgaggacacgccgctgtgcaccagccgcaccggcaggaacagcaactgcgacaccacgccgctctggtgctctgccgtctctgctgttgctggttccttgtcttcagctgggaacacctccatcacctgttcattgccgctgctgctgctgctgaggtcgctggtggagctcgtgtgttctccgaagagatccgcgtcctctttgtgctcgtgtccatggtccgcacgaccccaggactgcgcgatgctggcgcgtacgtggttggtgatgtggatgggcgcggagaccgccatggtcgtggcctgcacggccgccttgcccgccaccacgtacgggagcagcacgaggttcgcggcagttgaagctacgcccagcgtcgtctgtagagcggagcgctgcgcctcagaaagagcaccaggcggcgagtccaggtcctccatggtcacgaccgtctggatctgctcgtcgtcggtctcggcctcgctctccgtaaacgcctcgctcacgaggcactcgccgtcgtccgccatgacgcttgctctgccttcgacttggttcaggactgagatcagttattaagaaacatcgaatagaaacgtttctaaatcgaggtttaaaagtgacaggctgccgtggcgggcgacgtggcacggcgacgcgatacgacgacacgacgatcgactaaaagtgcgacttctagcatcacgaggagtgattccccgcagttcgacgcaacttgcatcaaccgccaaagtcactgcacctcgactgcggcgcgatcgtaaagcaggaaaagcaatgcccgaataagatggcgtcgggcactggtcagcagtaattctccgacgttcgtctcgacagtgtctcgagccgcgcagaccagacttgtcctcggcgcgaaggaaagccgcccaagtgttttccgagcggcaagcagatgcctggagccggctcccgaacgaaagcagcggacgctggaaaccccaatggcacttgatactgtagcgaacggctgccgttggtcgtctcgctggtcgcgcgcttcggtggacgaaagatggagctggggctcagcagcaagagcagcgtggtgccttccttaaggaacttaccagtggcactgcagtgcgttggaagcgcaatgtatttcctctagacggtgttgctttatggggtgctggggccagcgtgttccggttcaaaccacaaagtgccaaggtgggccgcggtcggcgaacgcacgcgagatttgccttgtccaccttcctacacttggacccgcgcacccgccaccactgtcgagcgttccagggcttatctcgcccgaagcgtgccgcagctcgctcgtgttgggcgtccgcgtgttgggtaaggagctcctccgtaacggaggctccgttgcattttggctccgctcgaaggtacggtaccgtgtcccctaaccagcgctccatacgaaatccaattgcatcgtcgggacttggcgctcgcagcgaaaatcaccatgctggagccaaagttgcccgcaggtagcagcccaacgacagcagtctttatggggcccatatcgcccatacttacatgcactgtaccggtacgccaccatggcagactggcgcattcagtgcttgcgacgccagcacaagcgagcgcttgctgccggccgagcccccccccccccccgattcaatcggggggccgattgttggtttgacatgagctaggggtgtggtgattggatgaaacgcgcccgccccgcccatccccattcaacatacggtccaagcgcagttcgtgtttaggagtccccggtctctgtccgattacagacatacaaagcgcagcatcgattccatctcttgctggcaaccagttgaagagcattccagggcaattttccaagagcggtcggcaccaccgctcggctgctcactcgcggcctgattcagcgatccgaccagcaaaaacttgctcatactgtagctactaacaatattcacgacagggctggtggccctggtctcaccaagtctgtgatgcatgtagcaactgagagagtcgaagtggttggcgctcggtgctccacaactcaagtgctctcggctcgacgaggacaaaacactaaattatttagatggagaacacttctcctccttcttcatataccaagacggcatcctcgcgccccgaatgtcaaggcagcaagcacccttccacagaaaatggtccacagtattgctctccaatcgcagttcgggtttgccagcaaaagagccttttacccggggctgttctctgcgcggtgtctcctctgccctcccttttatacgtccgtctctattcattcctccctcagtcccatactgccgctcacagcccaaagcctcaacaaaggcccgctctgctcgtgtagtgtcggccttcctgcgcacctcctcctcctcctccgcccgcgcgctgacccgaggactgcggactccgccgaggcgggcggcacacaagctgagctgatgctggactcgctgtcttccacgcactccaagtcggcgctgcgctcgccgctcacgtccagtctggacgagcagggcagcacgcccagcgcctcgtcctcgtacttcatcgagggcccgtgggagcagcgcaaccggcgcttccgcaacgtgctgctgcacgtgtgcagcttcattctgatcctcgagttcgccgagcgtgtgagctactacggcatcaaccagggcctcaagaacttcatgggcaagctcggctggtcgcaggtgggctccaactccctcaagagcacgtggacctccatctgctacctgtcgccgctgctgggcggctacgtggccgacgagaagtggggccgcttccgcacgctctgggtcttcggggtctggtacacgctcggcgcgttcctgctcacggcgtcggcgcaccccaagttcatggagcccgagcacggcaaccacatcgccgccaacatcctgtgccacatcggcctgttcgccggcgtggccgtgggcacgggcgccatcaaggccaacgtcatcacgttcggcgccgaccagttcgacccgaacgaccccaacgaggtcacgcagaaggagcacttcttcagctacttctacatcgtcatcaacctcggcgccatcttctcgtacgggtatctgtcggtgctgtgtgtggagggtacgggtgctgtcaccaaggagtacggctacttcgcgtgcttcctgatctgtggagcggtcatggtcttcgcctacgtgctgttcctcttcggggccccgagatacgtgcactttgcaccgcaggacagtgcactcaccaagctttgcactattgtgcttggcaactgcgccttcagctacgaggccaggatgctctactacggccttatcgcgttcggctcggccttcccgttgaacctgttggcgtcttttttgtctgactggttgtccgtgggccagtacctgtcgtatttggtcgtgatgtgctgcgccttcggcatgtacgcgtggatccgctacggtatgaacacggcgtacatggacaaatcgaaggcctcgaacggcggcaagtttaatgacgagacggtggacgagatcaagatggtcatccgagtgctgcccttcgcgtcgttcatgatcatgtgggagtgcgcgtacgatcagctggacgccaacttccagtccatcgcccagcagtgcgacctccgagtgggcgccgaggacatcagcgactacgacgcgatgcagattccaggtgcaagtctaggtatcttcgacccgctgacgatcatcctgctgatccccgtgctggacggcttcgtgtaccctttgtgggggaagatctttgggcggccaccgagtgccttcggtaaagtgcttacggggctcatcgtggcgatgctgacgatgatttggtccggattcttcgagatcatccggcgaaacagcggcgagatcgtgtacctggacgcgaacggcacgttgcagaccatccccaacaacgggtcgaacgagccgatgaaccacacgtactgggcgtacgccatcccgatgtacgtgttcacggctgtggccgaatgcctgatcaacgtgacagcctacgagctgttctacacagaggtgcctgtgtatcttaagagcacatgtcaggctatcaatctgttcatggttgccatgggaagtaatctgacgtcgacgttcacgctgctgttcgagcactacatcacgaacaacctgaacgacggccactttgagtacatgtactggacgctcggcgcgctcagtctggtcaacatcatcgcctacgtgacggtcatgaagtggatggagttcggcatggtgcggtttgacgcggacgacgagttgctcgacggagccgtgttcgacagccacggggtggacatcacgagcatccagcggcactcgtcgttcgagagcatttccttgtcccgggggtagcggcccgatttgccgtgtacccgggcgcgtgctgcttcaaaggcaagcgagcaagcgcagtggtggtctgttgatacgattattatgggtagggtgaatacacaactttttttgcaagctggtgttcctgctaggagattgggctggattcgatgccattacgatgttggtgacaactagggtacgtgggttgccttgaggtttgtgtgcggagtttcggtcaattttaggcaaagtgtcgcttcaaggggagagcgtggtgggggggcttcatggcaagcaagaagacccgcgcgcgtaaagctcacgatggaatacggctgagctcactttcgcctgagaaacgagggcctggcagccatggagcagcgtgggggcaaaacaataacgtggcggagctcgcaaccgtcttcgcctacaaggagattccgaaggaggtgctggtcggcactgatctagatttgtcggtaagccactagcaagctactgatccacttgctgggcggatgctcaacttttgacatgtttccatccttttgggggaaggtttggtccgtggtggcgtccgatgcgtgcttgatgcgtcttgggcacaattgtccgggctatcgaatctccagcccaacgtatattcgaccacagttcaacctgcagtcaaatcagctcgccgacttgctctcctcagctgtgccagctgcagccaatgctgctttcaacgatgcatcgactgtggcgctgccaaagcagcaatcgatcattcgactaaaccttgcgggctcagatcaggtacgcgaagttgcgaacttttcaaacgaatatgcaaatgcaattggcttacaagcgatatttcgttttcacctaaaacgacagattacagataaaactgcgcacttgatcgccaccgcgtgccccgacctaaagtttctcagtcttgaaagagctgtgaaggtgagctacgcggaataaatctgagttcttggtttttacgccaaagctaacctgtcatgcgtccttatttctagttgacagatgccggcattcttcacatcgcgagttgttgccgtaacctggaatcactcaacctcagctacgtgacagcgctgcaaagcccatctctaagctgcatcggagagcttcgactccccttacggtgtgagcatcacaaccacagcttcatcgacgatttagctactctaacatcatgttgcgtgctatgttctggtagctcttgcgattgctggctgtattcgagtgccagacttttcgctgcttcggctctttcaagcttgtcccacgctggaatccctcgatctctccttctgtgctagcgtgaccgacaacgttttattatctctgggaaagaactgcagcaaactccgacagttaaagcttcgaggttgccgccagatttccgacactggcgtggtggctctagcgaactcgggaggcgtcaacagccttgtattgctcgacctggcgcggtttgatctgcagtacaagttcaacgacatatcgctgctggcgctagctgaaaactgcctcgtgctccaaacgctgattctctctggctgcgatatgctcagcgatgtcgggatggattggttagcgtccgggtgcaatgcactgacccacctcgatgtttctggctgtgtggctctgaccgatctatcgttacgtgcgatcagcgagagcatgttgcagcttcgacacctcaatattcggcatttatctcgagtttcagatcagggtatccgccggttatcgatgggatgtccagaactaacgtacctagacgctgaggggcttccacttctctcggatctgcacacttcgtctggcaacggtggtggcggcaacgaggtgtaccgtcaaggcatcgctgcgctggcggcaggttgttcaaagctgaggcacttggacttgtccaactgtgctgcgatttcggatggaacgctgcattgtgtagcgacatcgtccgctgagctaaccacgctcgtgttgtcaggctgctatcgtattaccacaactggagtgaaagacgtcttagctcactgcaccaagctggtgtcgctcaatgtcgcggagtgcgatcaggtaacagatcacgccttcacggatattcaccaccacagtcgaaatcactctccactgaaggctgggatgtctgggtattcatcgaatcagcttcatgtgcttcgtttacgcggcactcgagtttccgacgtgacgttgaaatggctaagccgctattcgccgcagcttcgtgagctggacgtgtcggactgtactggggtgacggacatgggtttgctggcgctcactggggctacgatggccggaactctacgaagtctgtggcttcgaaacgttgctgacatcacggagacgggggtgtcctggctggctgaaaagtgcaccaagctcatgctgctagacctgacggggtgtccaaagatccgctcgttttcgatcaaggccctcgcttcgtcttggaagttcgcactctacgcgtgtaatgaacaattcaaaggcatgacacctcgccaccgtgcagaagattggctgttcatcgaagagtacggcaactgctggcgagctgcgattcatattcaatgcatgtatcgagctcgagtggctcggcggatcgcgcgtcagaaacgggaggagcggttgatcctgtgggtggcaactcggctccagagtgtataccgcggacgccaggctcggaagtacgccatcatcttgcgctttcagttcaacaaggagacggaggctgccactaaaattcaacgggcttatcgtgggcttttagcgaggagagaggcccagagacttcgcgaactgcgtcatcaagcggaagtactgcgagcggcaaggacgattcaagcttcctggaggaaaaagagactgagagaaaggttgcggagccgacacctccgccgtctagcatacgaggacaagctgcgtcgctgtgctatccagattcagcggcgctggcgaggcaagaaagaccgcgaacgcttcaatttaattcgcgctgcaaagatggccaaggaccgagaagagtttgaggccgctagacagttgcagagcatttaccgtgtccgcgcagcacgccgagccgcgaacctcaagcgtgaagaattaaggaacgaggagaagcgacgagagcgagctgctatgacgttgcaagaccatataagacggcaccgagcaaggaaagagcttcgtgcaatgcgcgcgtatgtggctgaggtgaacggtgctgcagcccgcattcaaaaggggtggcgagcgaagaagaggtaccaggccaaccagatcattgtgatggtccgacagaagaagcgcgagaatgatgcagccgtgaagctccaagcagcttggaagcgacggaaagcgaggatcgaggtgaacttaatgcgcttggcacgagacttgcagcagcagaaacttgtagacgcggcgttgatggtgcagacgaattggcggggtagacatggtcggctggaggcacaggcgctcaagcagactgcgatggagaaaatcacgcagctcttgaagatccagaatcacgccgtcacgttcgtacaagcacactaccgtggatggaagggccgagaattgtatcgagaggcgaagctgaacaagaagaagcgctggaaagagatcgtccgccctgaaaatggcgagaagttctactatgtgagttttctgaggaccacgaccaccgtcttcgaactggttgagactaagtgctcgcatttgtgttaccgttcttgtagaaccgagtgacaggcgaggtgcgattccggagacctcaggacgttttggatctgctaccgaagccgctttgcgaaaactgcggtacagtcaaccgtgaagtgaatttgcggagtgtattgatactaacccgctattcaattaaaactcccagcgacgagtgaggcgacgatggagtgcaaggactgcggtgaaatgttctgcggcacggtaagagtttgattgcaatttattatctcgcgttgacgacaccttcaacgaaatttcaagtgttgctcatcatgaagttgcacttgttgatgtgttgcggtactgtactgtagtgctgggccaacgtccattcgggtggtcgacgcaagctgcacgagttccgagcgctgtacgactactacaaccggcgcgtggactatggagattgggagttcccctcgcggtggccgtccgagattgagcaggacgagatggacgggtgggggttccgaacgcacccgcggcgcaggccggacgaagtacaaggcccctgggaacgctacgtggaccccgacacgaatcgcgagtggttctacaaccgcgagacggaggagaacagctatactgccccagagggtttcgcggtgcagtcgagcggcgcagactcagccgagtggatcaagtactacgacgagaagcagggcgcgcactactactacaacatcaggacgcaggagagcacatacactcagccagcaacgtacgccacgccacgccttgcgccggcctccgcggcggtgcctccgaccgccaaccaagacggatgggaaaagcacatcgacccgcagagcggctacccgtactacttcaaccggttgaccacggagagcgtgttcgcccgccccatgggcttcgtgacgacgcgcgaggcggacgcgggtgcgactgcgctcggttgggccaagtactttgacgcgtcgagtggcagctactactactacaacgcgcagaccaacgagagccgcgccgaccggccggacgcgttttcgacgccgcggatctcggcggaggacgcagcagcgacagcggttgggggcctggccgagttctacgacccgggcacaggcaagacctactacttcaacgcgcagaccaccgagtgccgccaagctggacgcgacgtgcagcgcgcggagtaatcggtcgcgaaggagaagcgcaaggacaagaggcacgttgacgttgaagtcgacgccctcgtcgtcaacaacagccgcgattgccccacgcgctcggatactttgcgcagcaagagacacaccgcactatcctgcgtcctctatgcagcgcgtgtctcgccgaagcggtcaaaatggtccaaccgcgccgccgacacgcgcgagtcacgcccgggagctttccatttcgctgcgcggacgggaaaatttcagttttccggatcgaaatgactggcgtggaggcacagaaggcgggtcacgccaccgcggtccgtcaccttggtgcttcctggcgcccttacaaatcttgccggtcgcattgcgctgccggccggttggtgctcgagagctcttttgcattgccggcgaccggcattccgctggcgtgtttgcggctgggcaggtctgccataatacaccaaaatggacgcacgcgcacccaaatccgcgcggaatcgctgtcacacgagggcaatcgctctctggagaaaacgtcttggaatcaacactcttcgtgtcgggagagaagcatgtagccatcgccatggagctaggaatccgctaaaatatatattaaaaatcgacctgggatctcatactatatacggtagaagttaccagctcacatttgcctacagcacggatactgtgatgccaggcgcgcgaaaccataaatccggcggacgaatgcacaggctcgatcgaatatatcacattattttgccgcagtgggttggttggctgtcgctcgagtcgaaagtctctagtctaagaaagtctccacccgatgacatcacttcgctgcgagttgactccagcgagccggagcggctacacgccatcgcgggcaacgctcggtggatcatcagttggcggattacggggcccaatgcactgtggcagcaggacaagccccggagcgcttcgcctgcagtataaacgttattagacgacggcgtcctggcgacatgccctaggggcacgctgcttcgttcgcgttgtagtttgaagttgccggcgcgtgtttctcgcgttatttctttgcggtcccgttcacttgacttgtcgagtccccggcgtcgatgggtccgcgcagaacgagttttccggcacatttacttgagggcttgaggacgcatagggcgttagttgagtccgtcccgtttgcagcacttcaacctggtcgggacccccgcccagcgcgacggcgagcgcagaccacgtccacttgacatggtctgcagtccacagagccccgaagctgcatcataccgcgcgttgagcaccactagcaccacttgacagctcttgcagcttggtcctctgactgcaattttcgaccagcatttgtgtcgcgagaccgtccactcacgcctccgtgagttagagcacggcctacatgtatggcgatgcgcatcaacacggctctggatacctgtcgcggcttgcgactgcaacgacaaaagaagaggcatgagccgtccggggtgtaagccatgacggccatggagctcattctgcaattccctgccctcttaccacccccatgacgttcatggcgcggcaccgccccgcccaagcgcaggactcgatggagaaggagctgagcgcgtccagcggcctcacgctgggcgagtcgccgcagcacgcggccagtccgcggcgcagcatcttccggcgccgcaagggctcggccgacagctgcgcctcgaggctatcgctctcgctcacgcccgacgaccggcggcccaccaagcacctgccagtacacgacaaaggcaaaggctgctccagtagcaccagcagcagcagcactagcggcgcgcgccggccgctggcgctgccgcacaccatcaccgaacgacacggcggccaggagctctgggtcaaggcgcccgtggtctccggctcgctcgagaagcgcggcttccgctggcgcaggaagtggaagctgcgcttcgtggagcttgacggccggcagctcgcgtactacgaggactcgggcgcgttcagcgccaccacagcctcggccagcggcgtcaagcgcaactgcaagcccaagcgcaaggccatgctcacagccgacgcccagctggaggacgtggacgacacgacgctgagcatcacgcccgcgctggacgagaagccgtggctgctgcgcgcgcgcgacgccgccaccaagcagcgctggctcgtggcgctctcggactgcatcgacatcttggtctggctacgtcactacaagctcggtgctgtgctgggcgtcggcggcaacggcgtcgtgcagagactcgaggacgagcgtgacgggaccgtgtacgccgtcaaagtgctggacgtggccaagttccggcaccgcgagcaggtcgtggccgaggtcgagatcctgcgcaacatcaccaacaacatcaagcacccgaacctcatcaagatccacaaggtctacgaggagcaccagaaggtctacatcatccaggaaatgtgcacgggcggagagctctacgaccgcgtggtgcagcgcggcaagtactcggagagggacgcggccagcatcatgcagcagctcgtgtcggcgctacaggcgctgcacgcgcacaatattctgcatctggacatcaagcccgagaacattttgttctcgtccaaggacccggactccaagatcctgctcacggactttgggctcgcgcggatgatcaacggcaagcagaaccctctggagcagggcaagtccatggccggcaccattgggtacatggccccagaagttatctcctcgcacgtgtacagcgaagccgccgatgtcttcagcgccggcgtcatcctgttcattttactggtggggtaccctccattctacggtgattcggaggtggagatcctgctgaagattgctcgcggagacttcacgttcgacccgcaggactgggcgcacgtttcagggtcggccaaggagctggtagcgcgcatgctggaagtgcgcgcgcaggatcgcatcacggtggacgaggtgctggcacactcgtggatcacgcgagaaggccccaacagggatagcgacagctcggtccgagacctgagcgccagcatgatgaccaagctgcagcacttcaacattgaccggaaatctcagagcatgggctcgttcttggcgtctatgctggttgacgacaacgaggctgacttccaggctctcgtggatgaggagaccgtcgagatgatgatccgtcagatgtgcgtcgatggccacaaccgcatcccgctacgcggtgcgcacgtgatcgcgaagggccttggcctctcgccctacatcgacgagaaatcgttcgtgcagttcctggaccagaaccgcgatggcttcatcgacgcgagcgacttctgcgcgggcgtaagagcactgcgcaaccgccaccagtcgttcgctacgatggtgttctcggcgctgctgaggatgaactcgcctgaagagaagggcgattcgtccgatgaggaagtccccgagtctgcagtgcttacccgcgagcactttgctgtggcgttcaagaagctggaatgcccagagccgctagtggacgtctttttcaagttcgtggacgaagaggaggagaagctgaacgccacagaaactggagaaaattcgtccgcctcgtcgtcctcgtcgtggtcggtgaacgaagccgagttcatgacactatttacacagttctctttcctgggcatgctgttcctgcgcacggtaaaggacaacgtggtctccatggtcaagtcgcacagcgttgatggcatgccgcgtatctccgaggactcgttttcctcgccgtaggatacgcactaacaacccgagcaaaactctatagactgtaacgtaatattaaaaacctggcgtcaagcgccaactttatttaatccgtttgatcatgtaatgatgctcagcttggatggcgtcgtcgaaggcgtcgacgatgctggcgagtccggcggtgtcgtccgcttgatgtcggcgtcgggctccgcatcgagaacgcgcgccatccaggcttggatacgcggtagcgcgtagttgtagccaacctcgatgatctcctccatcttgttgaactcgagcgtgccgtagtccttgaccggcgggcgcaggtacagatcaatgcattcctccctgatgcggtccttgtgctgctccgacgacacgtacgccagcgccgcagacacgtcgcccattgagggcaccgcgacagtcttggcgaacgggttgagcttgttccaaagcagccaccacccggacaacgcgctgccgtagtcgtagaagtcggtgcgcgactcgctgcccacatccacggcgaagatatacttgataccgccttcctccttcatgatgtccgcaggaaggttgttcatatatccgccatccaacagaagcgatccattttccgagatcggggggaagtaaccctgcaaactcatggacgctcgcacatacttccacgccggtccactgcggtgcacgctcatacgggacttcgcgatatccgtggacacacagaagtaattcagcatcaggtcctcaattgacaagtcgtagaagtgcgcgcggatgctcttgttgaagcgtgttccattgaagaaggacgagataggcagcgtcaagtcccggagcttctcgaaaatgctgctcagacctgcagatagctgcttcaccttggactcgatcagatcgaggcggttggggtgaagcgcatagatacctccaataaacgctccgatgctggtgccaccaacgacatccacgtggataccacactcctgaagcgctcggagcacgccaatatgggccaggcctcttgcacctccaccgccaagcaccaaaccaacagagttgccggtgattcgtcgactcaaacgcatgaaatccgatcgatgatcctcaaacgggagctgcacgttgtggtagccgctgatccactcgtatcgctccatggggagaataaatcgaggcagcaaggggctatccattcgcagacgcagcttcttcttcagtgcatacgagcgcgaggacccattggcctcttgcttagcagcggcttcgagagcagtcaaagtccagtccttctcgcgaacacgcacgacgttgatttcggcatctctcttgtcccacgcatcctcgagaatagaaatcatgtcactgacaaatgcctgctgcgggtgggcgtccgagcacagcaggaggacgtggtcagcttggcggatgcagagcttagtccaagccgtcaactgcgggtcagcctcgtaaatcacaagttcatttgagctctcaatgtcacccatccacgcagtaaggtttgctcttgaaacgcgcgaattgctgatccactggtcgcccaggaaggccttggctttctgcgatgatactgtttccaccgtggccagcgtcttcagcgacttctccaagtgagagcagaacgtctgaatcttggtcttctgggtcagcgaaatcacagcaaccgtacctatagggaggttgcttccagtcttctgtccgtcggtagtggtaggcctcgagcccagagacagcaagtagttactgcgagccttgaggccactagcatcgggcttcaaggaatccacgcgaggggtcggcatacggcgcgccaggttcttggtgaattgaacaagcacggtggggtacttgttgaccacgtagtcgaacacattgcgagacatttgtgatatttgggagtcacgaatggcaaacaccgacgagttgctggctcccgctccaagcatgtccatcgcacccaaagtcgctcctcgcaccagttcatttgtcgtctccacctccttaccacggtagcagtgcacttgcaccgctcgcaggcggccactgatgactgtgaacacagaatcgcacagatcgccacgatcgaacagactctcgccactgtggaggtgcagccagtcgaacgatgtatcagctacacacaccaagtcggagtactgctcaatcaggtggcgcgcgcacttcaccgctaccgggttgatctgcaacaagctgcagaacagcgcgtccgggatccaaagcagcgtggtgtcttcctgacaaatattgcgagttgcgaagtagtgtgatccaacgaagcacgtcgaaataccaacttcacatcccttcgtggccttgtacagttcagcgtacgtctgggtagccgtggcaacctgtacactgactgatccgctcagaacgatgtggactcccagtgcagtagagtcgcccggctctcggattgtctgcttcttggtacgcttaataatcttaacgcagctggccagcgtcgacctcagctccgagtcgtgcaaaccaatagcgtccgccacactttccaccaggtccttgacgggggtagcctccgccgtcttctcgccttcttcaccgcccagcaggagcgggtgcatgagtggcgtggcgctgataatcttcgacgacagtccgaagtggtcgatcagcgacttggccgtgatcttctccacctgactcagcgccgcctgggagaggcggtagaaggcctcggggtacttctccagcacctccttgatggaatgcgtcgggatcttgaacaggcgcgtgccgtcctcttccgctcgcgcagacaagctgccgcacaccttcttcacctgcgcgctgcactctccatgctgcagttcgttcacgagcaccgtcagcagcggcagcgacgacgtgagcgtgtcaccacgccccagcagcttggagaagcgttgttcctccttctcgccgtggatggacagcgaggcggacccattcacgatcagcaggatggatccatccagctcgccctcgtcgaagatcgtgtcgcccttggagaagcgcaggatgcgcagatctcgcgccagcggctccacgaactcgccgcgcaggaaggaaaagaccttggacagcgtgtcgtagatgaacttgaggttctccgggccgcagttctgtcgcagctccttggggaacgtgatgttgtcttcgagctcgagctggcggttctcctgcatgcgctcgtgctcggcctgcagcaggtccgagaacgacttggagtgcttcgagttgtgccgcagccgcttggacgtgggcgacgacggccgcttctccagcttggcgggcggcagcttgcgcggccggacctggcgagacgccacccacacgaacagcacgcccagcagcagcgcgaccgccaccagcgtggcgacgccgcccaccgcgtacgggttctgctcctccacgtggccgcgcacgtcggcggccaggcgcgacgtcttgtgcgccgccttggcgcccacgcgcgtgaacgcggcgagccgacgctgcagccaggcccacaggtcggacgaggccagctcggcgcgctgcacgagccgcgtcagctccagcgtcatggtggccgaaatgagcggtgggcctgcagtatgcattggtgggcctgcagtatgcattggtgggcctgcagtatgcatttataaggttccctttccgaaagggcacctcccataggttatatctggaggccacatagggttccagagggaaaaatgctcttagtggccgtgggcgttctagaatgggcgttcgttgcgtccttgaagtgcggacccgaccagctttgcaggaccatgaaaacacctgcagctctgtcgctctaaggttggcggctctccttgttgagtgagactcgaagagagcgtcggtacatgcagtcttccaatacccaagcaagtccatctagcggttcatgctgtagatttttttcacttcgacatgcacggtttttttaagtcgtaaacgctctcttcatgtattatacatgtagcgcattattgctgagctctggaacatcatctcccagcgataaacaaaaaacaactaaccacgatacgtagtcgacaatttagaacgtcatttcacttaggcagtgacgttatgtctactgtattgtgaccggcatggggtgaatcacgttccagccgtaagaggttttgtaagatttggcatctcagctcggttagctgtaaagtgcccctgacaccagcacaacgacaaatgccctcggggaccagcactacgacaaatgccctggaactgcactacactgcactctcgtgcaaggcgccacaagtaccacgaatagttcaaagcgactcggtttcaacagtctatatttgctgagctagctgcaaatatccgcagtgaagggctcaccagcatcatcgatcgtggtctttaccgcttggtacgtcatgagcgcggtgcctatgaccacagccgcgctaatgcagagcacgacgatcgattgacgcccactgcgcctcacgtatgcaaggatcaccacctgcgctgccgaggttacagcgaaagttactgcgcacaacagagcagcccagtcccacgcgatcatgttgaacaccgtgtacttcgccgttgcagccgctgaggagtacaggatcatcagagccatcgtggacgacgctacttcgggcacgattcccatctcgatcctgatcggcccagtgatgatgcctccgccgacgccgaacatgcccgcaacgatgcctccaagcgcacacccgagaggaaaacatatcacagccttttgcgtccaacggatgtcgccttcaatgtacaggtaacccacgctagctttgcgctgataggtagtgcgagctgagcatgatgaagacggccacccacggaatctccgccaacaggatcacccagtcggccacgcctccgcacgacacagatgcatcaccgatactcgtagcaactacgccgaggtagcatacgaggatggctccgtgctttctccaggcgaagtggcgctcctgctccagtatttctgcgagcactttgctggcatcggcatcttgttcattatcaagtggcacgttgagtgacacggcttgcgccgatgcagacgcagatttagctgcggaggcatcgctgtcaatggaggggttgggcgtgaatgcttgagcgtatgcgtcggggctcattgctgcatccgccgtgtccttggagtcagcgtccgcttgtgccttcttggtactctcagctctgtacagctgaattcctttaatcatcatccgcgttccgctggcagccagcaccacgacgaatagcagcgatacgatgtagctcggcagcagcttgttgatgagcgcgcgcctccgattacgacggggatcattccgagcgcgagatcagcgtctatcagcggtcggtctgcagacgggtggcgcttttgcatgttgaaccaagcgttcgccaaagctccgcccaagatacccacgttagaaatgggcgtcgcgcgcttgatgtcgaagcccatgatgagcaccatggccggtaccatgatgacaccgctggcggacacggccatgcccacaacgatgaaaacaatggcgagtgcgtcgtaggtgtcaatctcggacaggctcggcatggtatcgtcgtcggtgctgctgtcatcgaccgccacgacggtcggggccgcgacaacgatggtaagcagcacgaagaggaccactccagccacacccggatgcgatgagcggagcctgggcgtcaatgacgttctcatagtggactggggtcacttgtagtccggaaaaactgagagtggggcgggatcgtgtacggtattcggcaactcacatttgtggcatgaagcgtcttacacaactcactgctggcaggacaagtggacaagctgtctcaagaccgacgaccattgtacgagctgtttagtcacctcgagtgattggaagagttttgtggtgcaagcggacgaaggctcatgaaaatgcttagccccgctggtacagtacttcgaagtagtttctatcgccaacaccaacaagcaatcgtcggttggcaacatccgccataaacccggcaacatcccgaacaaagtcataatcagctagctagattacgtgaagagctctcacaacgctgtcgtatactgtacagctactgcatgcgtgctggtgcaggagtttccttttcatttcattaggccgcgatgctgttggccaccgcgtcttaaaattaccgtcagcgctatccttttcaacatggagttttcgcagacgcccatcgcgctttatttatttaagcgagatgcagtctcgacttgttgagtctcactacaacagttgcctgcggatgatgttctgctccggaagcccgtgcatgatgtgatggtccagctagcagacacctcgagtggagccaaggtttgccaccggtcacttgaggctcctcgtaaatgctggtgcagatgctcaagagtggacgagactggttgtgatgcagagcaaaatgacacgagtattgctgcgtgattcctagttgtgttttaatgaaagtggtctttgcagagatgtcggtagatgcagcagcatgagtacatgttggcaacatcccaaagtgggaaaggtagtgtgcaaccggatctatctagctgggacgagaactattttactgctgccgttgctactgcggatcattcttctaccaaacttggcgaagatgaagtgggtgaaagcggagcagctccaactcgtgtccgccgccaggatgacgttaaggcggtttcccagcgagtctctggcgcgaccccgtttggtagtgaaatacacgctgcactactccttcacggagcggggcaacatttgcctgcgctctgtggaggaaacgatgactcaaatgcttctactcatcgaccgatataagctggcgcagtcgcatctacggaagcagaaccacggtactgttccggcacagatcgaccgagtcgcctacaatcgccaccttggtggctacttggatctcgacgtctacgaggccttggagcagctctcgaagcgtgtccggcggcagcacttcggcttgaagttccaacagcgggcgcggaagcgctacaacctgcttcttcgcgtctgagacgacgaaatttgagatggacgtcggccgagctggagctgctagccgacgcgttggtccagtgtcaggagtacggctgctttagcgctcaagtttcgcggaagttcttgttcctaggtggtgacaagagacgcagtgtggcagcagttaagtcgacaacgcggcttctgcgcaacgcgtgggagtttattagtgagcggtttagctcttggtcgctgtggttcgacatgtcgcctggtcggcgccgcgaacttcaggttgagtgtcgtgttaatgctcggggcactctgaagaatatgacccctgcaatttgccgcaggctggacaaccttttcgaatggaatgaccgcgattcggaagaggaggaagaggagtcggatttgagcgaggacactccagcccccagtgcgccacaacatcctgccctcagtgaccgagtggacgaccaggaagctgcgagcgtgagttcgtctactggtggcagacccgtttcgtgtgatcaagtggagtcagtggttctccgtgtgttaaaagcgtggggtctcattcaaggtgaaggctgagaagcttcttagccgcaaaaagcacaagtctcaacttgcatccagagaaacttcagatgaatagtgattgctggatcaaagtgtctccagctgctgtagtgatgcaagtttgctttcgtttgcttcggttttttccttaatgaatgaatactacgtaggagtttagccacgttcattggtcttctagccaactcacttgtatctttgtcatctctcaaattatccaccttgtcaatgtttttatctatccagcttcctcttacatttaagcggacgtgaagtcgccccagtcttcatcatcaacagcagtcgtcggttccgccaccgccggcggtggagcaatggccggcaccttgacggccgtcgacggcgagtctccgggcggcggcgggatgagcggcaccttggccggactcactgcaccccctccactgctgctccgtcgagggcgcgtggccgcgcgctctccgtcctcagctccgttggtcttgaggtttatccggatggtggtgccttgaggcagactcaagtcgggcttcttgggcgacgacgagccgcccgatccggtctgctgctcggcggcttcgacctgctccacctccagctgccgcagcgcgtacttggcgtagtcctgcagcgtggccttgaagttgaaggcagccgtgcggtccgggaagccgatgcccacgaaggcgcggcggtcgctctgctcgtcctccacgcgcagcatgaagtagcgcgacgagtccacgcagtcgtgcacgtacacgtcgagcgccagctcgcgcgtgatctgcagggggcactgggcgaagagcgtgggggttgcggccgtctccgcctcgtcctgctcggccgccacgggctcgaagagctgcacgaagcacgcgtcgcccctctgcaccacgcgcacggagcccgtgaggaacgggtgctccgggtcccacgcgtcggcgcgcggcgcgaggctcgtcacctggttggccggcacctggtagaaccacacgcccttctcgctgaagagcgcgcgctccagctcgaacgcgtccgaggaatccgtcatggtctccgctaagattttcttgaaatgggtctggagttcaaagtgtccctgcgatgtggctaccgtcaccagatgcgtattgtggatatagcgaggatgagggagatctgataaaggcacacccgtgtgatggaggggaaactgtggagtgagagtgggatctggagatgggaatggaaggagatgcagacacaggttgttgaggacgacgacaccgactgtgtaagaccaaatgtaactttatatacgcggcatggtgccaagtgcatgcacttgcggctgtctatctacatctcgttgtagagctcgcgacggatctctggcgtgatctggtggtggaagtgctgcttgagcagcgccttcatggcctccttgtgctgcttggggatgtcgttcttgtagcgctgcgcgaagaccagcagcgactggtgccacagcaccggcagcttgcgcgtgtcggacgtgaagcgcaggaagtgctggctcagctgcgagatcacgcgcgtgggcagactgtacttcttgttgagcagcacacggatgaacatgctgttgccgcccgagtactccatggacgccagcttcatgagcgtggcggcggagtggatcacgggcaccgacaccttggacagcacgctgccgatgatagccgcctcacgcagagtgcagttcctgctctcgcatagcgggatgatgatacccttgaagaacgcctgcggcttgtacagcgccttcttgagcgccatgtagaggtggaagttgagccgcttgttctcgtggatgtcctgcctcacgtgctccagcaggaagatgttgaagaagcgctgcgccatcttggggttcaagttggacgcgaacaatcgcgtggcggcgcgcatggcgtgcggcgaccacttctcggggctcgtgagccataaaatgtcctcccagtagctcaagctcgggatgaccttgaacgccttgggcagcttgcccgacgtgtaccgctgcaggatcttgcccacgcccgtgtacacctcgacgatcttggggtcgaacttgctgttctgcggggcttggctgtcgtcgtccatctcgcctcgctcgcgggcctccttctcgaaaatcttgtccatgatgatgtcggccaggttgcggcgctcgggcgcgcccaccatgaagttggcgagcgcctcctcgtcgtcctcgcagatctccacctcctccacgtagccgtcgttgatgcgcacgaggtcctggccgtcgtactcgtccgtgtccatgtcctggtcgtcgtccgactcggcgtccgactcgtcgctgctgtcctgcgcctggggcttggcgggatgcgcggcggcctggcgggccttgctcttgttctggcgggcctgctcctcggcctgctgctgccgcgcgagcgccagcgtgcggcggctcagcttctcgggcaccacgtcctcggccatgtcgtcgtccgagtcgtcggcatcgcggcgcgcgcccttcttgccgccgctctggtcgtaccacggcttgttgtcataggccagttgcttctccagcgggcacgcgcgcttgggcttccccttctcggccttgggcatggtgatggaggcttaattaaagggctcttggagtctgcgtccggcgatgataaatggctgcgcgctgcgtccactgtgaccaccaacgtcagtccacaaaaatggtgtggtgtacataattcgatgccaaaatagtgtagccatcttgtttcgacagacgacagcatgcgaaagatcgcaatcaataatggagaagacggagacggcgggcggaggagatgcagtggcagctcacagggcgaatgaggctacgacggctagtacgattagcagtcgagacagcgagaatggcacgtcgacgtccgactaccgcgtaaggagctgcgcatcgtccggaaacgtgttagccgagctattgacacaatttggtgctgtggaatttgctgtcgttttcttgttaatgttgccaatagatgagcagccaggccataaagtctgtgaatgaattactggaaaaggatgcagaggacgagagcttgcagaggtacaaagagcaactcctgggggctgcagctcatggagatcgaggaggtctggcatgagtctttgaggttagtttgggggtgttcgagctcgttctaacgtttaattgcatggctgctgactgtagacacaacggactcacgtcgtgttgtggtggaggagttcaaggtggagtttgaggacgggagggaggatatcgtgtacaatttggacacgctgcagggcgttgagcatatgcgcacgacgcctttcgtcattgaagaaggctctcgctaccgtttcgccatctccttccgcgtgaaccagacgattgtgagtggcctgcgcttccacaataaagtgaagaaaactgtgctggccacgcgcgacgagattgtgctgggctcgtacgctccgcgatcggagaactacgtgtttgttttccctcgccacgactggatggaagctccgtcggggctgttctaccgtggcaaatacatgggcagattcatcttcgacgacgatgaccacgtcgaacaccttaagttgttctacacattcggtacgttggtagtggagtgtcaaaggcaagaagaacaagctcatttatattttatatgtttctgaacttcctcgcagagatcaagcgagcctaacagtgcagtctactcgagctggttaattgaaatgttgtttagcttgattgggagggctattgcagggttgctgtcttcctttccgttgcgaaagaggctttactgcttaagtttgagctcctccatgaaccgtttctgctgatcgatcatgtacgtgatctccatgatatcgttggcctccgcggggttagtaggaggcgtgcggaggttatgcattgcggagccgcccatgtgcaatgggatcaactcggtgtccatgtgcttggccaattcagcggcgcagtcgtgcatgagtgacaccttgctgcgcagacgcacaggtaggaacggccacagccacgacgtgatgtacttgaggaatcgagtcaacggaccggcgtagacgaggccaatccgatcagggaagttggcgacacacacatcgagcaacccgcgcataaggcgcaggtctacctgcttcatgcccagcccagcagagtctgtcacgactgtatacgtcgtgactccaggaggcataaagcggcggcaccccagttccagcaggtacacgtgcgcacggacctcaacatcgcgtcgacttgccatcgtgtcccagtcttttagcttggcccgaacccaaaggatcgggcgattctggaagtcgtagccataccagtacatactgccagacacaagctgagacttcacgtcatcccaagcgatggtatcgacttcgtaaacgcgccgccactcgacgatatgcgccatcttcgttaccgcgtatgcaaacgcccggttcttgacgcgcagaactctgaagaggtactcatcagagaacacgtgagtcacctcgacagggacgccagcagcttgggcaatcgccagtcgaaacgagtgcacttcagcttcctccgcttgcgtcagcacgatcacagctcgatccatggactcgtgctgcattgtcgccactgctgctgatcctcttctattcgtggacgtgttcataggcaaagttgacacaattcggctagcaacatccaaagtatcttgaggcgccaaatgagattgtgggaggtcgggcgccttcgattcccgctcgattcgtacttgcgaagttccgttgagttcatctgcgtggctgcgtggctggaaattaatagacagtgtcgccgtgccaccactcagcgtcagccacaatagcaagcctgtcacaaggctcagcttcaacggaccgggtaacagcactgtcgtcacgagcgcgtctagcagcactagcacgcagcagaaacagaagaggttgaagagacggaaatacctccctttcagcttctcgatctgatcttgtagacggcgacgttcctcctttaaccgtgccactcgctcgctcgagacaatagcacgacgcttctcgtcgccgtcatcactcctaagctcatgatccgcaggttcaacgcataccttcttgtatctggccgaagtgttcatctggaatgcagctccgttttcatctcgactagcaaagcattccacgataagttggtgatgcagcagctcattcgcgagcgccaatgccgttgggacgctatacgcaccaaaccgcagcagagcctgaacgccgtctgtcccagaaacgccatcttcttctcgatcaaattgtgccaataaatgctgaaacgcgctgtcttgtagccacagcaaatgcccacgacaccgctccctactcggtcgatcctcgtcctccaactcccgttcactatccacactcagcatctgagcttccttcaccaacccgtggtcgctattcacgcggtacactctgtccacacgatacacaaagctgcacgagcagcagaagggcagcagcacgtcttcctccacgagcttcctcgccagcgtggacgcttcactcgccgtaaaatccgcagcgctgccatctccaagtaaaatgtcctccacatcgtatcccctcaccaccgccgtgtccgcgtcgctctccgtcgctgccacgagcatctccaccgcctgctgcatgtccagcagcgtcagcgagcgcgtagtagcgcccaccgcatctccaccttcctctacatccatcaacgacaaatcaccacgccaactgctgctaatattcgctctgttacgagcgctggcgaacaggtcgatccacatctggcgcttgcctctggtggtggcgtccacgaggaactcgcggcccgagcgcaagtcttgcagccgcaccgagtgcatgtgggccgaggacaccacaatgccctcacaactcagcgacccatcgagcggcagcgtctcagcgggcggcggggccttgggcttgctgcgctgtctggccagcttgggcttgggcttctgcttgagcttgggcttcgtcttcttggggcgcccgcccattgctgcagctgcggcctgccacgccgacggcggcccctgcagcacgaccgcatccttctctagtaaggccacgcgctccctccacacgtagtgggcgtcccgcagcagcacgcgcccgatgtccatcctgttgagactgtaccgctgatgagctgctcgccgtatcgtacgtttgtatgtacccatgtcaacggaagttgattggatgaaaatatcaacatggatacatctgaagttgcagtggtaaggctacttgacttgcgatatgtgtcattcattgttagcaattagttatcatttgaagctgctggaagggagccatgttatttagcggtggctgtcgatgggggagtttgaggttgcggaggggagttctgctgggcgggaggtggagggcttcttgggtcggattactctggcttggggcgggatgacgttgaaggggcctcgggcaggggcccgctccttgggcatgaggctcatcttgatgtcctggatcttcttggtggcctctgcgacttgcttcgattcgaggacagactggacgttgcggttgcgttgcagcagacgcttcgagtctaggttgcgctgcttcaggtgctccttgcgacggccgtcgatgcgcttcaacagcgctgctagttctgcttgctgctgctggcgtagcttggcctctttgcgcgcgaaaactgcgcgtagctcctcgctcatcttggcgcgctcgtcagcctcgacttcatccgcgatctgcttgatcttctgcgcctcagcgtagctcttctgctgagccaagcgatgctgtcgacggcgccactcgatcagttctttggagaacttgggcggacgctccagaatttcctgctgcaacttgtcttggaatgcagcaaggtctgcaccgtgcttctcggtcatttgcttcacgtacgcctgcgccatccgatcgtactcctccatgtactgatcccacgcctggttgaagtcgttgaactgcatgttgtgcgcgatctgcacgtcctggcgctcagcgatttgacgggccttcagcgacttggactgccttttgaattcctgtcggcgaagcgccgtcaattgcgaatctgcacgctgcgcctccaagtagtttccgtcctcttcacacttcaagcggtactcctccaaaattgcgatgaactccataactttgggatctggaccgggtcgtaagcgatcgccaccaactcctgtaccaccgcctgcaagttcctgctcctgctcttgctgcctcagtacgtggttttggatgagggacacaaagtcttcaaagctgatcacgccgctttcaccagcacagtcatccagctcgttcaatagctctgcaaacaaatttaaataaaggttagtcatcccaaactaaaccttcattgagcattcgtgactctcaccttcagaggcatctcgaccaagcttatctagaatttcagggatgtgttccgtggggatgcagcccgatccatcttcgtcgtacacattgaacacggctgcatagaagaaagcggcgggtgtcagcacagcctctcaacaacaaactaattgatcagacagcaacacgaacctcgaagagcgccaatctcctcggctgagaggtcgactggactctcggacatgacgaggtagaggctgggaggcaagcaagacgcaacagcgcaattgatggcgtcttgcgtagacggcttgaagttcctccgtgttgtgaaaagctcggcttgtcttgatcaatcttgtcggcaaggcttgctattcttgtccttccatgatgccatggcagctttagcctgcagatcaacctcaccttccgtcagttttgatactcaaaataccatgtagtccagtgcttgcctcaaagacccagccattcgatccgcaatgccccgcagggtgatttcattctccgcacgagcatcaccatgacagctcctgtcgctgccaagcgccagccccgactcgaccgcctctatctacaaaatctactcctacttgcgctgctccttgctgccagcgacttcctccttcaccgcatcatccacgtgagcaagccacgggtgcgcgaggcactcttcagccgtagcacgcttggctgggtcgtagcgaaacatcggacccaggaaggatgaaaggcattcagcatcgtgacgcgagaagtgatacttctccataagcacttgctgcaggctccagaacttgaggttacgaatacgcttcaaatcgcccttgcgattgaaaaactcacgcaagccgcgctggcacccggtgaaggacttgggcatgcgacctagcagctcaatcatctgcgccaaatgatcctcgtcacgattgaagttgcgtccagtcttggggtcgaaaaggaggtctccagtcaatagctcgaacacaaagcaggccatggaccaaatgtccgcagacgtgtcgtatcgtttgcccaggatgacctcaggacacctatactgacgtgtctggatgtcgttcgtgaagtgcttcgtcgtccagcacgcgttgcccaagtcacagatcttcgagtcaagcttcatgaggtcgaacatttcgctgttggcgagtttgttgaagcgtgaagcccagcgaccgagtcgttcctgaagcggcttggcttccagaacattcttgtccacagatccagccagcggcacgaggttaattccctgtattacgacgtcgagcatgtcatcgtcagtggcagcgtccttagtcttggactttgctgcggtcttaatatcttcgttgcacggtggagctggaagaaagaacccaggaagcgctaagccagaagatgtcgacaagttcatgaagcgaaggccctcgacacgacgctccagatagtctacatgaaacacaaacacaaaacgatgttagcagatagtatgggggacagaaagtataggataattaaactcacccaagacagcgtgcgtgtatcttgcatcaaactccaatctccacagtcggtacttcgccttggtcgaagcaacagtctttttaggagaactgccttcacgcaactgcatgacctgttcttcgatcgattccaccacgtcctcatccacgtggtcaagataccggagaacaaacgaagtctccacaacttcgtcttcgtcttcgaggtcgtgattgttcgttgtttcaccagccgcctttgatgacacacgcagcgtgaattcgcgctccttccgtttagagccagccacgcggccctcagggagcagcagcatcactcgcgctgcaaactcgggaggcaaatgcacccagtccttgtcttcttcatcgcctgtctctccaatctggtggtaccatgtccgttccgacgaatcctccgccacagcgtcgtcatcctgcccagagaagtttgccttgaagacgtggtcggttgctccattattaccagcaccatttgataccgcgagttgggacaaggtggcgctcagcttttcgacatcctgagaagtgctggttgcgagcgtggggcgtgctgggctatcgagcttatcgttgccaataccaccgtcgacagaggcttcccggtctccacattcagcctgcttcctctgcttttgccgcttctttttgagtctgttcttcagacgcttcttctcttctttcgacagctctgcgccatctacagctgagtttgctgtaacaggctgggcgttggcgcccgccttggccccgcttttagacgcctttgcccccttttgccgccgggcaaggcgcatcgcacggaactcttcccactgcgacttgcggatcttcgggagctgagggatgtggtgtgagagcagcacgttctcgggcttcagatctgtgtggatgatctggcacttgctatgcaggaacgccagtccttccatcatatccctcgtcagacgctgcacgagaggcatgggcactccccggtagttgtagtacttgatcagcgtcagcagattatcccccatcatctcgaacaccatgcacacgtggacgccattcggtcccttgtgttcgaacgagtccacgagccgaaccaccttgatcacctcctgctgctccaccgacttgaactccttccgcgccgccttcacggtgcactccagcagctcgatctcgtccttggcagcttccgtgtagtggcgagcgctcttctgcaccttcatcgccaccatggcgcccgtctggcggtccagacacttccacacagtggagaagtggccccagccgagcttctccagcacctcgaaccgcgagttgtacacttcaccgacctgcacgcggtggtagccgccgggtttgtagctgctctcgccctcctcctcgctctcggacgagtactcgtcctcttcgtagtcttcgccctcctcctcttcactgctgcatctctggctgctgctgccgctgagcggcgagaaggagcgacgtgccgtggacgtggagccctccacgcttctggacgagccggactcgacctcctccaacgcctccgggctggaggatggcgtcgcaacgggggtagcgactgcagcaggcgccggggcagctccgcggccttttttcttgcggttgcgcgtcttcttggcggctggcgggggtccctttgtggccgctaaggcgatgaacaaaacattggagaggggggtagtgagctggctgtagggagaattgaggggcgttgaagctgtagatggatacacaatggagcgatctatacgtacagctggaggcggcggcggcgcgcgcggcgggggcgtccatggagctgcgagaagagcgggcacgaggagctgctcgcctgcttggtggtggtgcgtggctgacctgccagtgtccgcattggctgtaaagcggcggcgttccaccaattagatggaactgcaacgtttgcgtgagccacacaagtggtacacaaggtgcgcattgaagagcgcgaaacgaggaattaccatgatccagtagaaaagtactggatcgtcccccattttcttcatacagtaaaaaaaaatgctaagtacgcccggcacgccacttgcgaacctatcaaccatttatgggctaactgcgggacacctgaaatagatacgtgggaggtaagatttcgaaggctagtgctaaataaaaaccaagtagacttgaataataaataattctctgaagggtgattcacagctatattctgctgcattgtgcaaaagtccaagtcaagagcaagaaaccccccaaactacggctctgctcgcttttcactcgacgtgtctgatctcgaagctgccaaggagttggaactactcagggacgatgttgcagtcgagtcgacgaacccgacaagctcaacgtatggcttggcctaccagctccgagagaatattgccaattcagtcttttcttcacaaaaagtagtgcaaagatttggctgtgaggtgcggcttcccgatttttgtgaagcaaaccagtgtgaaggccgccaactccggtaatgcgcaatttgcgtgcaaggcgctcaatggaacgcaatatttcgaccggactacaccagctgcccaactcacgtgtccgtttttcgtaaatgttcacgggaaatcggggaagtggaagataacccaggcaaattttgcgcacaatcacctcaagttcgttggtagtgccaaggccccttgtgttgaagggtccatcccgttgccgtccaagtccacgcggaataccatgcagcagataagcaagctgacagcgattgtcgagaccgagatgcttcccgcccacgatggatcttcggcttctatgtcaggcgccgctatcaggaagtttctgaaatcgaaaggagtggacgtaagcgctacatcggtgccccgaatgaagcagaaaattgacgacaacattcacggcgacttggtagaaagttaccaaaaactgcgggcggacttcgagttgatggcgcacaagaaccccggatcggtttggagagtggaaactgccgcggacggatcgtcgtttggtcgagcgtgcttcatccctaacgctggtattcacattgcccagaactgcaaaaagatggtcggctttgacggggtccaccttaaagaggaaatgcacgaacagggcatttatctggtagctaccgtgaaagactacaacaactacatcgttccagttggactcgcgctggtttcacaagaggacaaggtcaattggatttagttcctgggagcattcaaggaggcagttgactgggaaaagttcacgatattgtcggatagacaaaaaggcctgcttccagctgtcgcgacaattttcccaaacgctggtcatcgatactgcctgcggcatatcatggacaacattaagaggaaatgttccaggttgtcccaggaagaccgtgcgtgggtatgccgaatggcacgcagcgactgtgaaaatgactataagctgtatcgaagtgaactcgccgtgaacaaccctgccgctgcgaattttatggacggaatcgaacgtgctcactgggtgaagtacagtttccaagaaaagtttaatctcccgactttcgacgaaataacctcaaatttgtcagagcaagcgaacaactggataggtaaagagcttcggaccgccaaacccttggacggattccacttgtccttcttgaagctgagttaactgatgtccaaaaggcgacaattgattgtaacgtggacaaaatctggcgcactctcggatttagtccccaagttgttagagcgacgtacagaccgccaagctgcagctgatatgtgcgagtttacacccattctcgagtgtgcgtacagcgtcttgttcaaggaccctgttgccataccaggatatgtgcacccagaccgggtagtggatttgccagcgctggagtgcacgtgcggcaattggcaagaccaaatgttcccttgtgtccacgcaatttgcgctgcttcaaaggatggccgacgaatcgaagacttgtatgacgccaagcgtatgtcgatcgagcacttccgcgatacgtacacattcaaatttctcccttggccgacaacagcaaccttacagcgggacgacacaattcttcctccacaacttgaacccactcctgaacggattggtaaaagagggttaaagccggggaagaggccacaacacaagcgaaagattgtgaaaaacgcgctgtagggacaagaataagcttcgtcgggcaaagccaatttatactttatcgatctgtatttttgacaaacaacacttcataattaatagatattgtgctttccgacgattctaaccaaatatgcaagtgttgctgagtcatatttgggtaaggtatattaaaaatctaaaccgatagatctctagtgttgtgccgtagaacacgcgagtaaaatatttcgtgaaaatctcttaaacgctagaaggagtaggaactctacgaatgtaccactccatggtacaccctttttgtataatttaagccgcaatggtgcaatatgctacgttgatctgcaatctgaattttgcaatttaactacgttaaatttagccaaatcacaacctgacctccgggctgaagtctactgtatttattttaaggcaacacttagaatagaaatagactgcgaactacattttcagcacttcggcaaaccccattctgctttgtgctcaatgccacgccttaacccacgacagcgccacgcccggaacatccagcgccggctggacggctcgttttaccgtctcccactgaatcccggtatttccgctcatgacgtcagcgacgaagacaccgacgagcaggaagaggaagaatcatcagtcgggggtggactccgagaagaacgacgtaggggtggtggcctcgtcgcaagcaatcgaagggcccagagaggcgtggatgggcagctatatgaggtagagcgaatatacgcgaaaaggtggatcaacgtaagagtatattatctcatccaatgggttgggtaccgggagcttacatgggaatcgggaagccacgttccgatgcgcctgaagctacggttcgaacgcgaatcgatcgacttcatctgggtctaccaatcgacaagagggagacttcggactcgccatcgacgaccgacacgacgcagcgcaaggatccagtctcgcagagagtaggtagatacgtcttgataaatatgcatcacgaacttagcaaatactgtgacagtagtttgtttttcggtcggcctggggggcgatccagtactttgctactggatcatggtaattcctcgagcgaaaccgatgaatcgcacaagtgcttccttgaaaactaagcacttaagttggatatcggtgttgtccaaacaactcttcgaaggagaagaagacgagcatttagattacaagattctctacattaagtcggttcggaagagttcatttgatgaagcgccggaaggtttagcgcggcgctcatcaagatttttttctagacctccgccacaaagcgagctttgtccttcacagttcgcgctttccgtagtttcatcaaccgagatggctcctcaaaaccaacggattcacatccaggtcaatggaggatcacccaaagctgattttgctaggaaagcgggttacatatgtatgatagctgagcatggtactgaaggaaacgatgctgctagcgtcgcacagaattcgcaccatatttgctcttgcgatagaggtacatacttggtcaaagcgtaccaaaagtacacggtcactgtgtcacggtggctataccgactcaactgtttgcccgtctggctgtggggctgctggggcacggcactccatcgacgcctccgtctgcgagctcgagcgccatgcggacaagccagccaacccggccgatgctgggcgtgcggttccggtggagcgcgcgacgcttcgaaattgagtatgactcaagcgcgcaatcgcctcgctggcagcgagtcgctgccggcaacacgcagacgcagagagcagagcttcctcgctcagagggtgaagctgaagcgcagcaggcaagcaggcaggcaggcagcagatcgattaagccgggcaccaccgccacatagtagctgtctgaccatctaaccgttagaggattgtgaggatatccaaagcaagaaaacgtgtctttgagatgttgcctctgaggtgttgacctgccttaaagttcacttgaacgcgcgcctgtcattataagaatgcaagaaaacattgtagccattgtatcgaagtatgaatctattggttgtctgctgcagcgggcttgagctttttgtgcttcttcttgttgccatcgcggttgttgtgctgctgctcctggcgcttggccttgcgagcgtgcaccttgtcgtcgaagccgcgctcagtcagcttcatcttcgccacgcgcgtggcggtggtcacgtcgttcagcagctcgagcaccttcttctcgggcgcctccgcctcgtagtcgtccatcttcttgcccaccttggcctcgatgttctgcagcagctcgatgtcgtgctgcgttacgagagagatggcttggccgctgcggccggctcgggcggtacgacccacgcggtgaatgtagtcgtcggcgtcgcgcggcaggtcgaagttgagcacgacgtccacctccgggatgtcgagaccacgactcgcgacgtccgtgctgatgaggatgtggctgagtccgctcttaaacttgcccagcgcggccagccgccggttctgcgacatcattgagtgcagcgtcacgcacttcgtgccgagctcgtttccgatctcgcccaccagctcgcacatcttgcacgtggacacgaagatcatcatggagcgcagctggcgcttggacgacgaggtggcggcttccaggagctgctcaaggtcctggtccttcttacccttacggatcttgggcttgtagttcttcttcttctcttcttcttcttcctcgtcctcgctcgggtctagcatcttcatcaggtacatgaggtacgtcatcttgacctgcgccgggatgaataaataaaactgtttgagcgtggccacggtcttcacgctaggcgtggtatcgaagcggaacgcgtcatcagacagcgcggtttgctccagcctgtcgaggttggccgtcatagtggccgagaagagcagcgtctgccgcttggccggcagcttgtcgaagatgaagctcaggtccttggcgaacgatacgtccagcagccggtcggcttcgtccagcaccacgtacttgaccagcgagatgttgggtggctccacgcgcagcaggtggtcgcggaagcggccgggcgtggccacgataatgtgcggtcgctgttgcagcgtcagcgactgcttgagcatgtccacaccgcccacgatgacggcgcagcgcacggccatggagctgccgaaagcgttaaactggtctgcgatctggaaggccagctcgcgcgtgggcgtgagcaccagcgcgtacgggccgtacgggtccttgcttagcgtgtgcaggatgggcagtgcgaaggccgccgtcttgccgctaccggtctgcgcgcagccaatgacgtcgcgtccggacaggatgggagggatgcaatgaacctgcactggcgtcgggtggcggatgcccagcagctcgcagcgcttgaccagccatgggtccacgccgagattcaggaacgagatgagcatgttggacgccgagtcggcgttctccaccagcaccttgtcgttcttgccattggaactggaggcggggggctctccatcggaatcggagctggacacagtgggcttgggctcttccgtcttgggcgcttggcgacgacgcttaccgaacaggacgctcatgctggtgaagttgatgcaatgagcgagaatggctggacggtggataggtggtgtggacacataatgtagccattccatgacgacatgttccaaggagaaagctgctgcatgtccccccaccgtagtttgaaggaaatcccattagaataatttacttattgtcttggagagaggagccatggactagagacgcgtgtgctcttgccatcaggcgctacatggacgacaggtcttaccgctttcgtatcgcatcattttccactcacgtgacagcgctttagctgtcgattccgaggtgcttgaggtacttgaagcggaggtcgtgggacgagcgcgctcgaggtgacaccagcacctgcttttgggacagcgtgagcgtcggcacggacgacgacattgtgctggagctacgactgagcggcggcgacaggctgcgacgagctgcttcagcctcggctgccgactccgcggcctttcgctgctgggcctcgatggtacgttgacgagcctcctcgcgcgccatgccctcattttccaggtactcgttctccagctgggcctcgtactcgcgctccatctcatcgtacacggcgtccagattgcgctctaccatcgcgacgaactcggagcgtgtatgccacatgcagtcgcgttgacgcttcgagtagtcgcggtgcagcgggatgtagaacagctcggcctcctcgttgaagcgcactcccttcttctgcgtgggggtatcgacagcggaactcgctgatactcgagacagcgacgaccggagttgccttgcgctggtagagcggttcttgtctttccgcgacttgtcgtcgccgctgacggccgtgatgggcgcgtaccagctcgtgatgaaccggaggaagcccttggcgccattttcatccttcaagccagcatcgttcaactgcacctttaagccttcgcgacgctccttcttgcggccggtactcttctccaggtcgctacgtgatagactaaagcccagttggctccagtattgtctccgaatagccgccgaatcttttcgaagcaaagggacggctggcgcaagcacgtggtcgttggtgggtcctcctactactgcagcttgcagcgccgacgtgtgcttcctctcttttgcgctgctggggcggcggttcctgtcgacaatcgtagcgctggcaacagaggaatcaacattgcacagtgtcggtgagctaccgctgagtcgcgtgcggaccatgatcgggctgggggttgagggaaggctctctgcgtctcggctggcgccattgagcggtgcgttcttgccgttcgacttgtttttcaggttgcggcgcgagcgtctcctgcgcttctcgtcctcgacggcgaggtcgtccacggggcacacctgcagtctcgagggcatcggcttgaccagaaagtggctggctgaattctgctgctcgtcgtcttcgtcgtcgtcatccccctgctcgtcgtcgtcgtcgtcgtcttcatcctcgtcttcagacgacgacaaggcgtgcgcaccgtagtcgtcgtccagggcgtcggcgcttgagtccgagctggagcaggagctgcagcggtcgctgctgctgctcatggtgctgtcgctcacggtgctggcctcgatgggcgtgctgggcgattcgctgctgcgcttctccacggcagccatgtcctcaatggctgaaagcgcgactgtcgtcagctccgccggcgcgtgtgcgcttgcgcttgcacctgcacttggcgcggatgtgctgccccgcatccggacagtgtatgtgtgaatcgatacagtcgctgcagccggctgctgcatggtggtggcggtggtgcgcggcttaatcgatctgctgcctgcctgctgcgcttcagcttcacccttctgagccaggaagccctgctctccgcgtctgtgtgttgccggcagcgaggcgattgcgggaatgagcataagggcgaccggctttgcttgggtgtgggactgtcgatgagttccttctcggcaggaccggctatgcaaaaggacgagtatacggccgggtatacttgtagtggtgtgcgccacacatgcccgtgttcgccacaccagattatactcctcttgcagaggtgcacaaaccgtttcgccagactgccacggaaaagctcgcgatgccggccgcagcagctcgcgctccgcgtcacacacaaaaaaggtgggcaacgcgcccgccgcctttgtccccgacagccgacgacgacgacgcggtccggatcgcgcggagcacagcaaatcttcaaggagagtggtcgcggcggcttgccaagcatcaagttgttgttggaacattgagcgcgacggttgcgtccggataacgggctagcgtatcgcagagctgcgacctttcggcgaattttcatttggcttcagtatgcaccgcccaaagcttgaggtgccacactcggctaggtgcgatcacgcttgagtcaccggaccggaaccgcgcgcccaacaccggccgggctggcgggctggcttgtccgcatggcgctcgagctcgcagacggaggcggcgatagagtgccgcagccgcagcagccagcctgcgccggcagcaggtgcgctccggatgatttacaggctgctggctggtctctccctctgcgcagtccatcctcgccggcaacctcgtttctggcttgagagcgcgctgtgaagcgtcgtagatactcgctttgcagaggcgggatggctgcgctcaccttcccgttgtttgcggacttggaccgcgcggcgcccgcgggattgcatgcattaagactcctaataggacgtgtactgtagctggatgctcagctcgccggtcttgctgcaaggcaagacccgctaatctttggtttagagcgctgtttcagactgaaaactgcagagctgctgcgcaacgctcgtcgcgttccggatggaatttggatcgggtgatacagcaccggtcatgcccggctcgcgacgcctgattggctgcggtggagcgtcacacttcaacatgatctgttcgtcaccggtgccgcagttgcagtcgctgttaatcgctacagtgtcgctgcagcttccgccattgccgatttcgccgtgcagccctcatcaagacgcaggagaccggtcacacgctgactcaacgagagcgagcattatggcagcgttcgctggctggcgatgaatggagcacgcttgccggactggaccgacgcaggagcgaggttgccctttgtgggtgaaagcatcattgctgctgcatcaagccggccagggccaattaccttgcgaatttcgggtgcactcagcgtttgcatgcaggaagcgtgggatctcgaggtcagcggtctgctcagcggacagccgagtcggtggcgccgacacagtcggcccgacagcggagggcccatccgatgcttggtcctcgatgtaggagcgtacaactctgccggtgttttcggtcacgcgtggtctaacgtcagcgctgatcgcggcccgcccaatgttattctggatgtcgatatggatcgagtgaccgaccataagttaggcgaaagcaggcgaccatgatgcgggctcggaatcaaaaatcttcaatggatgcagcggcacggatctactcggactacagacgctctcagctgaaacttttagttgtgccagcgcagcgatcggattctgatagctctccagttcctcgcaaaatcgtgcggagaagtcattgcttccgagagtgtggcaaatggacgatatgagacgcgcgtggacaacgggcaagcacgtgaatcggtatacccaccgtataactgttcttgcgactgcaagcgtttggtgcgtgtttttagatacctacataatattattgtgccttgcgtgctttctgtctaaacaatgacgtaattcgttgttttagcaaatcacggtgattagcccatcattgagttaaaaaataggaggctaactcgtcgatttaagatagaatagctgctaagacaacgagctaacgttgagttatgctcactttcgttgaatggctggagtaaatccgacaatactacggccctgacattctaattctaactcgctcgctttgtctgattgctttctagtcgatgattgacatgcgttggcgatctatcgtacgtctacaattgtaacaggacatgggcagatggcggtcacggcatggtgaccacggaggcgagcagcggtagctggtcgcacgagtcgggcgacaagtggggcatggcggacgagagcggctggcatgggtgcgcggtggcgggtcgcgagatccagacgacggtgggtgcggagagccgcacgaacgcgatcttggcagcgaacggtcgctccgagggcagtggcagccggaacggacggctgggagtgagtggctgacgaagaagatctcgaagctgaagggtcggcagtgcgagctggccttcgggctagagaagaacgagcggtgaggacggggaaatttgcgcggtgaggcgcaagcggttgagaattagcgcgcttggagcaagcgagcacttacgagttgggtggcctggtgacgggttgccggacaacgaacgagggcgaaagctcttgctgggggcgacagctccttccggacgagtgacggacaggtggtggtggagtgtcgacgggcgttccgctgctactgacgaacgagtggagggttagtagctcacgtgcgtgggtgaactctctttgtattgactgagtgtagttagctcgagttgttggctgtgggctgatagctaagagttggctgaggactattgagtaatctagcctccttaataaattggatacgttcgtgtgtgtacggacgatccggcgcagtagctcgattagctgctgtcggccagcacggcgtcaacttccagttcccgcgggcgaacgaacgcagcggagcaatacgatctgccccacgagctgggcaagataagaagctcgttacacaatattgaagaacatccctgttcttatatcgaggagctgcaagcagctttaaagtcagcgtttcctgcactaccaaacatttctagtagaaattttctactgctactatatgccgtgctctgaaattcgagcttgcgcaaggccacgacgaagagagcgaaagaaaacgtccacgccgaaatcggtgcttacgattatgcaggaagtcggcgccattctatcggggaccttatcagtttgttttcttgcggcgacaaccgatttattcttgcagtggcaaccgctccgttcttgctctgcgttgtgcttggtactggcggttgattagcttaactttaacttagagttaggctgcgagatatgatcaccgggaaggatttgctcgttggtttagagcccttaatcgcatgccaaagttcgtgcaaagcacaatacatgcagcccttacaagggtcgttgcaataaatgtttgctctacgagcgaaaatttaatgcactgttgtcgtgactcagcgctttcaactccacgcaaaatccgtttagtgcatccccggtggtcattaccattagaacgtatgggtggacaccactcagtctaccggcggctatcaaaccgtaagagtttcctgacccgatggctcgagagcgctatagttagcgcatgcatgcatcataaagtgtattgactcacccttctgggctgtcatgcgggctgaggatgaacacaagggggatgccaggagaacccctcgccagattcctcgagacggcagcgagctcatcaaagatttcgtgcaagaatccgagcagcgccgtgttgcttgtcggtaagatcaaatacacgcaagcttagttccatacatgtcttcttacgctgtactcgttaaagttttgctcggacaggacgaggacttacgccgcggcctccagggcatcggcaaacacacacaccgtctcgaccgcacacacgaacgagaggtggccatcccgaagatgatcaagtggaagtgcgatccgggacgccagtgtctctctccgacaaccaacaggaagaagacactgtggcgatagttgaggggctattcaacaccaagcacgcgcagcagcgcaatcggcagatatcgctcactccggcgatgctccccgctgcggcggctgcagctgcatctggacttggtaccaacaacaagccgatattcacgttcacgagacgcaaacttcaaatggagagcgttcaaactggaacagcgccaattaggtcgccaattgcgccactgggaagcccgacggctgtatcaataacgacttcacagcacctcggccatcgatcaagaacaagcaacttggcagctaaactggatgccatgctgcgcagctccccttggatgcggcgcaaggtcgtactgcagccccaagtgaagggtcagagtcagcgtgttctctctaatacgtcaacgctacggctgctggcaggctactcctcgcccgtgcctccggctcacaaccatcacgaagcaatcgatgtatcgtcgggcaatgcaaacgagaagcaccacaaacagcggaaggcggggcaccacttcaacgacgtcgacaccagcgagatggagaagcggattatggccaccttccaacgatgtaagtgccttgagctagctatcatattggaaactaatgctctgttgtgtatgtgcgtgcacaaattacagtcgttcggctttggcgtgagcgaaagcgacggtcggagcaggcagctctcaacatggttcacggcaacggctccgctcagcctagcactaccaatgggaacaacaatacgtctggacgcaacggcggcaaggtgcgacgcgaagtcgatgcacagtcctctaatgtggcgagcatcttaagtcggcggatgattggcgaggtgcccgcactcaagtttttcgacgaagatgaaccgattcatgccgaccaagctgttcctgaccccatactgattgccgccgcggcatcgcgagctagatcgttcaataacgaagtggccgacgggatttcttcatatggtgcaagacgttctactaagttacatactcggacacttggcgacttgatggtgtcgtcttcgcgtggaggtggcgcgctgggactatcgccgcaccgacgagtgacaccgcgaggagtttgctacactctagacaaatcaggatgtcggcgtatcaaaatgcaatcaggtgctgtagcccgcacaaaaagtggagctatcaaggcccatggcccacacaagaataccgaagagatcacagtggagagggcgacgggcaagagcctacggcggaagtacgtatcgactgaaagcaagtttgaactgagtgtcgtttgctaaccctgaacttgtactaaaggatgattcggcgcgtgaaactcaagcatcaagccatcggaaggctcagcgacgatttcaagaggtccaggaatgcgctgacggcaaagcttgggtctcagttaggtgggatgttcaacgtcaccagacgaaatcgctgacagtgatcctaacgctgcgttgatatccattcacagcactacgtcaggctgagggtgaacgaatgttcggcaagcggttgtccttgctgctatccaacaatgtcgagctgccgccgcacatggcagcaaaggagttggcgctggcccgactgcgattcaagaaggcgaacctgcaggcgaaatgccaaaccttagcagtattcggtgctgcgcttcatcacgttgaaacggcaggcgaagtgagcggtctcgagatctcgtctggcgagcagcagttcctggagctcctacgctgcgctgttgaaggagaccatgcgttgactcctctcctcgtcaacggcatccttgggcaattcaacgccgagcaacggcacaagccactggtggcggtaagtcatttgctacagcaacactaccggagtcattaccccacgttaatgagctgctttcacgtttatcagggtctcctcgggctactggaaagagctgccccgcccgaatcacccgccagccatcacatcttcaccgtctaaaccaaaaccaagcaaagtttagtcgaaaatgttccattagttgctactcatttgtttctgtgtggtttcttcttacttacaatgacgtcttggcgccggattccatttgcatctcgctggtgggagcgaaaaaggtggtaccggatccacgctgacgcagatcagtgctagcagcgcctctacctgaggccggcgaggtggagcctagactagcagggctaatggggttggactgcttccggccacgcagatcgtccagcagcagaccatcgtcttcatgctcttccgctggcggcgacgtgtccatatgctggaagcggtagaccaccactccgacgataacaatggctgcaatagctgcagccacactgcctacgacagcaagccaaacgggccagctgagctcggacatgacgtactcgtcgctgttggcgaactgcacactggcgtcgaactgcaagtagactccatcgcacgtgccgttcggctggttacgggtctgaagcacgtagcacgagttgatagccgagctgttggcctgcttggtgatcagtgtcacactctccgacgaccagggcaccgagtagaggaacgtccccgccttcatgtcgcttccacgcgagccgtccgacacgaaatagtagaccgtgtccccaccggagctgctgaacgtgacgctctctgacgggtcgatactggagctgttggtcttccacactgccagcaagttgccgcattgcacgaggccgctctggtggaacatcctgaccgcgaggcagtcggtggactggcacttggttccctgcttgaagtagatccagtcgctggccacattggacgcattaagcgtcgtgagtccctggctcagtgcgcactgctcgaagcgccgcaacagcgtcgtgttgcccaggcagcggcggcggttgcgcgcctggaacaggttcgtgcagcccacgacggtgctcacgcacttgtggccgtcggcgcattggcactcgtcgtcgttgcagaacacgtcgtcaatctggatgtttcccttggcgttgcacacgtccacgctggagctggtgcttgaggcgttgcagttcttggccaggtatccgcacgcggtgcactcggaggcgttcgcgacgccggccagagtcgaaaccagcacggccagtgacacgacccacacccaacggaagcgcggcgtctggcgcattgaatgagctgtcgagcgcaccgatccgatgtctgtagccgccataccgagctggtgatcacgacgtatcctttcgctccgagttgctttgcgttctgatgatgacacaggaaccgacttccagcttctgaactggacaagccgagggtgtcaaacactgatcacgtttgaaaggttatgtgacacacacatgtttgatgtggtgcccacagtggtttcgcttcgtgataattgagctcctcaagatgagcgcaggcgtgggctaccggcgccgcgacgcgaacgcctcggacgcgatcgcggccatcctgcacccggacgagggcttccggtacgtcttctacctgtccccgcagttataacagcagaccatctcctgttaaggagttctttagagttgtttaaacgaaatttaaatatttgctgaatgtgaactgcagggagaagcagcagcgcagaggcgtgactccgaaagactttgagcgcgaaaacaagctgcgtgtgaagaagttgcaggcggagaaccgcgagcgccggcgtcgcgaggtgcgatggggagatggtggatgcgattgtaggaattttttacgctaatggtggggtggacgacaggaagccaagcagcagcaggagttcaagctgacgaggttcaagagtgtgagaccgcgggtgtttagagaggaggaggtatgtcgttgtggcagcggaatgaacgattgctggttggtgctgacaggtttgcgtctttgtgtgcaggctactagtggagagcaggtcaaaaagcacgagtatctgcggcgaggtggacggccctcttctgctgcatcggcccctggatcggtgtcctcattgccacggacaccatcggagtcgggctcgatgtcacggctgcagtcgccgtcgcattcgatgacaagtagtggtagcagacgccatatctaccacaaagcaccagttccatcgctgagggaactcgagcggagagatgaagagctggcggaaatcgtgggtgctcgtggatttgatggcaggttgtttagatggctgtgtagctgacgggggttgtgtccgtagaacaagaaggagcaggtagacttcgttaacgcgaacgcgtgggaagtcatcaagaagacgccttctgtacgcatccaggaaccggaacctcgacctgtgaatcgcaacttcggccgcattccgaagtacctgcttgaccgcaaggagcaatgggcccgagaggaagaagaaaggcgaagaaatgctccagatccagattgccctccgggcatggtactgcttgacgaagacgagcgcgtgcgcaccttaaatttgctgcgcaagtcgctaacggaggcccagctgcgcatgaacacgttgcccctccgcatcgagactctgaaccagattcgccggaagaacgagctggaaacaaaactgcaggagattgaagacgccatcaaggtcttcgaccgcgccaaggtgtacgtagctgcgcctctcgctagcgactccgaggacaatcggggacgcacggccagcattgccgcataactgctatccagaactctgtgtattagttagcacccacagttaagtgaaacacgcagttctgccatttagctcattgaggagaggaaggcctccacatcctccgaatcgagctcgttgaattcttcctcgctaaccactggctgcttcttggacttgcgcttgaggttatagcgatgccactcggagcggaagtgctcgcggtacttgctcatgtcggcgctgaagtcaccaccgcacgtactgcacggtcgtgccttcttcgtctcgccaccagtagccgccgccgtagctgctacgggcgccggtgtgggcgcagcagcagcaacaggagcattggaaattccgagacgctccgtcttctgtgagatttcgtcatcgatcgtgtgctcgccctcctggtgactcttcaaatcgatcacctccagcgatccctgaccgccagtgtgctcctgcacgagcgagttgacaatacggtacgatccgggcgtgatcagcaccaccatccgcaccgtctcacttccagtctgctcgacgatctcggcttcctccttgagcaggcccgccttgatggccttcacccccgacgccggcgttgtcacctgaattttcatcttggcgcgagccagcggaatgtgctcgggcagcttcttgatcagctccagcgcctgctgcttagcgctccggttggggatgacagcatagtggatctccttcatcacgcgctcgatgaccgtgtacgggtacgggcggttggacgtcgggttcacgcacttgtccgccacaatggtggcgatatcacggtacatgctgcgtataaaataaagcataaaaactttagtataaaaaataaaataaatgtagccattcggggcagaaaaaaacagagcgtacttctcgacgagcgccttgcgctctccctcggagacctgcagctctccatggtcgaggatggcgcgacacgcctgctcctcgctctgcacgccgaaggccttggcccagtcgctcttcttggcgaacttgcccttggacacgttctcgtagaccttggcgatctgcagcacctcgtcgatgtcctcctccacgccgttgcgccagttgaacaccttgttcttgtagcacgcgatctcgaagcgcttgccgcccttgcgcatgcgcaccacggccacgttcgtcagcacgatcttgcccacgggctggctgatgcggccgccactcatgcttgccggtgccttgtgcctgcaaatttaacactgggttgaaatgttgccaatcaccttccgccacaccaagtgtacacaaaggcaacaatcacttcaacttgctgtgagacctcgtcgcaagacgagattctccagtgtggccatgaagaccccgcgctacagccagagacaccttgactgagcgccggacaagcgcgaggtggtgccaagagctggatagccacggggttcagtgcacgccggaggacgtgttacttgagctccagtgcctaacgcacacagcgtggcacactcgccaagagatttctaaagaacttttcaacgatgatctgttggattggtatgtggacggaagacaccctcaacttgtccaataccaccgcaatatctacgaattgaagcgactctaccgaggtgtgaaggtcgatcagcgtagcggtactccagatggctcggtacgctggctggtttcggcttatccaggaggaccgagccccatgaagctgctggtgtcgtggttgcagaaaactttgctgcgtacaaacaaacgagcaattggagatgctgaagaagcttcgcactacgatgacggacatagggcatttcaattacacagagaagaaaatcgcgagaaagattgccgcgctgacccgagacgccgagcggggtgcacgtgggcaaccgcctcggtggcagccatttgctcgccagtgcgacttcgtgaagaagcttttccgttgggaggagtcagaattgaatgagaccgaacacattcaagcgggtctagactcggacactcgcatcgaattgctggtgcgtgtgcaggagcaggaaagccaactctgtgagtgtcgtgactcgaccagatctacgccgggagatcgagcagttgcttctgctgcaacgcgtgaacctggaccggcaccacaagtaaagacagaatggcctggaagctgcaatgctccagtacttgttgagggtggcgctgatgagggttctagtgagaacgagccagatgcaggtacaaaccaagtcgagtacccatttgacgaggccgaaatacgcatacggacgcgtgcagcactgggccgaaacaagctgcgaagcaaaggcgttccctcttgcgaacttgatgttcttctacctgggcccgcacagatcgcgcggagacactagagcgcgccccaaaatgtgcaatatccattcagcctgaaggaaatcaagcttcgctgccagttgggaggcaatcggcaacgtctacgcaatgaaggattgtccaaggaggagattgaagcgtgcatccctctgcccaacacgtcgccttgctcaaggcttcttcgacattttttctgtaggtaggaatgtattgtaaacaaacggcacatttttttcatcttttggtaatatctgacttcagccagtttacatgctgtgtagtggagacactactgcacgaccgacctcgacgcaagctcgcagcgattcactcggctgctataattcataatctgtatctgatagccaaggtagatagctcttgttacttcaggttgacgttgttgtcgtctgtacgctacgcgctagcactgaaacatgcaattgcatctcgtcgaagcacattgctcgcctacgacaacttggccaccacaatgtgtcatcgcttcataaactgccgttatggcggcggcttgccgtgcgggcgtgcagatccatcttcttgtgcccacaacatcgtgcgctttgtcgctgcttcggctttatccaggcgaaactttgcaggagttgaagttgaagcgttaaggaggacaggcgtttgttccgtcgtcatcgacgaaaaagtggcccggccgttttagtgacagaaaagttggctcgacagttcttgacgacaataaagttggctcgacggtatttctgtgacaaagactgcgacgcgcctcgcgcatgggcccgatcactttctgtttccttgccgtgtctcgcctcaggcaaaccgatcatgtgtatccgtcctgctggcgctcccggcagcagcgccgcggacgcttacactcggtgcggcctcgcctccgtaatgcgctcacgacctcctttccccgcttccagccgggaacttcacgttcctatcgagaattcggtgcgccacatgtgggggttgtcgtacccgaccccatcggtcgatcaccgccgctgccggacgccaccaattgtgccgacacgacgaccggcgcaagttccaccgcggtcaccttatcgctgttgactcgcgcgcgccgacgccagcgttgctgcatcgcgcaggattggcgctccgctcctgcgatcgactgcacttgaattatcaggagagtggttgctgcacccgtctactggagtcatcttttgaattgtccgcaccaataacctaaccacgcttctgacctccatccgaacttcgtatacgcggtatactttcgactttcaacctttacacgcatgactccccccccgccgcgcggtcgccctgttggccgtacaagcatgcacatgatgtcgacgactaccggtagcgcctagtggtgctgcagcgacacctcgtggcgacgatgacgtggagcgctccctggctggctgcaagactgcggtcgacgcaacacaaaaggcgtcaaagccccccccccttcctccctgcgcgcgtttgaagagatgcacgagcatcaggccacctctcagtcctgtcaggcaagtaactgttcgggggagatctatgcattacttggtgtattcatactcgtgtctgtacgcgcagcggccagctttaaccggcggagacagaaggcacttcctgctccgctttcaaacagctttaccaggagaacaagcgaaagagcgcaagcagaatgcgtgagacttgagcgtttgggatcagttcgagggcggggctcgctatggctatcgtcagtcgggtacagcggtatcagtcggggaaaataagtttccagtcgggcggtcgggtacggtgacgggtgacggtgttctcagtcgggtaccggtggtgatgtttgttgtttgcttggctaggtcaacgcatgcgctcaagttgtttacctgtacaagactacagctcgtggcgtggccacaagaatcttgcgagctgttggtatgagttaacgtaagagaacgatggaaaaatcaatgtaatggactgtccgagatgtgtaatgtcctgtactgctcgaaaattcgctccccgtaagctatgcacttcgtcatttcacttagaggcctcagagagaccatttgcaaccgaagcaaagcataggtctgcaatgttcggcgcgtgggccggaaggtatgcctaagtaggagtttctatctaatccagatacctcgcctggccgagccgaggacttagcgtaaggctcgagggggtggggcaggtcgcgcagcggcgcccctcgaagtgccgttgctaagtccacaggcgagagccaacgtgcgagtgtcctaccctctttaacatcaagtaacaagtgcttagtcgctttggtggtcggcattgggccttcgcgaacattcttcatctaaccggtctatacatggagtatacaacttgcttcagttttggtcggttcttgacggtcgtggtcgggcgcaaacggggacaattgtctcgtcacagcctagttttccatatggtggacgggtgcagcaacaagtgccaattatcagacgggagcggggacaggcgtggtgccgcgcgcaaactcacgacgggagctcgcgctccgccgccatcggactccgcttcggagcgacagacgcgtgcccctggcattaccagcacctcggtcgaaagggtgcttgcgcgtcgtcgtctacggtccgttacgtggtaacggccggcgcgaataaggttggctggagcggagcgcgccaagcttgacaggcaggcaggctggcgacagggcagctcgcgtgcggcggcgtgttccaagcgagcagcgcacggcccaccaggttgaagcacgtcaagtgctggtggccatctgaccgtctcgagcgattcgggctattggaacatgcccgccgccagcagctttttccgcgctgatcctgtgcattgttcacggcgagcgcttcaaggcgcatgatctatggcggcggggcggacagtcaaccgagaccagccacgcgtgtcgcggcctacaattggtcgcgagcgctgccgtctcaaggctcgaggaggcgttgcgagcacgggagccctgccaccactcgttcccggaacgtcttgacccgccagctttccagggctgcaaaaatccgccgggccgctcgatcaagtcgagtcgctcttcgctccagccgcagctcgtggccccgacgccaccatgacggcccgaaagcgagcgcggccacaggcgctgggctccggttgaacccggccatacattcccgtcgttgatcgccgccatcgtgagaaatgctggcgacgtccgtgtgcagagccgcgacttcaagagcgcatacaaagtccaagatgtgcgtttcgcgtggtgtgcatgtggtgtgcacgcgagcgtccaatcgaatcgtgtagccagaggaatcggtggttcggctcgggcagcaaagctgcactcattacgacatttgcgcactgcctgccatttccatctcttcagccgtcgatcccctgcagctagagatgagcttctcgtgcgtcgtacccgtgtcgcccgtggccgcgctcaagcgcgcccgcagcgccgacgacgacctgcgcctcctcaaggtcagcaagcaggccagcgacgcctccccgcactcgccgcgcgccgtggccgcggccgtgctggcccagcgccaacagcagcagctccaccaaatgcagatgcagcagcaccagcagcagcaggaggccgtctcgcccttcgtgctggcctgcggcaacatccgctacgccatcaccttcatccagaactcgcgccgccacgcgctggcgctctgcctgcagaaccagtgggagcgcgccctcgccgtgctcgagaagattgagcgcgccaacgacaaaatctcgcgccagcgccgcaccaaggtgcgcgagcaggccaacgccaacccggaccgcgtctttgacgcgcaggccatgccctcgcagccgccgcaggtgccctcccccgccaaggcctgcaagcccaagcgccgcgtgcgcttcagcgacgaagtgcaagtcgccgaggtcgagatgatcgaccgctcctgcgcccccatgcccatgctcatgcgggacgagatcctggtgctgcgcgcgtcgcgcccgatcccgctgcgcaacttctccgagttctggagctcctcgtcgtagacgtaccccctgtatccgtcgtcacccgtccgtgcactgtagtttgtagcatctatccctatttattgccattgctagaaacgaaagcaatacactctatatgctggcatctcagccatctccactcaaccgattgttgcacttgcactttgcgtcttctccgtccgcaccgaccttagtcgatcttgacgtagcgaacttacttattcacgagctcgctccacgcgctgttgacgctggacccacttattctaccttctctcagcagcccagcaccgtcttctcctggagcgtcggtggcaaccgcgtccggacacattcagccagatcatcggcgctgtagcgcgccgaaaagtgaaccagtacgagcgtgcccactcgctgaaacaaatgctcgtgctccgcgagctgtacagacaaaaagcgtagccagcagttcagtcgcgcgggcaacagcgcatctcgacgctgcaacgtacctgatccaagtgcatgtgcccgcgggccacggcgtcttgaaccgtcatcttgccgtccgcgtacgtggcctgcaacgtgtccagcacaagactaagcaagtcagcgcgcgcctcttattcggtgtacgctgcgggccacctccgcacctccgtgatgagcaccttcacgcgcagcaagtcccgcatgcgctcgtcatcgctcgctgccgtgaacgcctcgatcgtggtgtcgccagtgtacgcgatctcgggcgtgagctcggcgctagtgatcgtctggccggagcgcttcagcgcggcgatctccggcccggggagctcccggtactcggacttcagccggttgcgcttctcgaacagaatgtagcccaggctcggcacgcggtgcgtggtgggcactgcgcgcaccatgtacttgggcgagacgtgcacctcgtcgtaggcctgcagcggcaccagctgcgctggaaacggctcgtcgccctgcatggccgcggtgctctgcaagatgctctctaggtgcggcacgaggtgagccggcacgaagtactgggccggcttctgcttctgcagcgcccgacgcgcagcatgcgccaccaaagccccaatgtggtcgacgtgcccgtgcgtgatgaacacgtgcgacttgctcaccactcggtccacgaggtagcccagatcaaatgccacatccacggcgtccacgtagcagcaagactcgatgccggccacgcagcgcaagtggagcctgtacccgccagcctccaccacctttgccgccatgttgtcgctttcgcctgaaagtgtatccatcacttttccttcctcctggatgccgattacgtaatacagtgtggtacacacaagaactacgcataatcataacgacactgcataacgcccacaaagttgaagctcttggttgaagcgaatcgccctttgcaatcaagcttgcggcatacatgtatatctgtcatgaaaactagtgtgacgacctcgttcgtttggtcgcattaaatggagaccacttgcgtacggtgaaccatatagtgcagttgtgcatgtagttagtaagtacatgtcctcgggttgcagcgaacatggcaccgctgagaagcttagcggtgggtagcctatagtgcaacacagccctggcagtgccagtggcaccggcacaaccgtttgccgagatactccgcttcaggtatcagaactcgccgtgcgatcattgcgttagaactgtcgttgggtggagtagatggaacattgcaacttaagttgctaccgtagatatgctcaagtgcacgtagcgtttgcctgccgatgggtagcgctgcgctagtagtaatgagtaagcgcgtcgcaaggtccttatgctgggccacggattctgggacgccgcagaccgcgttgcccatctacgagccatttacggaaccccttggcggcggcaggcaaactgctggtcgtgctgttgcctgcatcctccacatgttctgctgcagaccattgcgcgcgcggaattcacgccatcgacgcctccagcacgctgtcgctgtagccaacgcgatcgccgattcacttgactcgtctctgcgcttgctcaatttcacttggactctgtatactaagctcgactggtaggtgggatcatttcgcttgaatgcgaacctgccgccaagttgacactcaagtgcccgccgcgtcccgctccattcgaatcctcgccctgcgccgcaacaatggctccgtcctcgtccgtctccgcgcggccgcgccgcattgcgccccgacgcatcgcgctggtgctggcagtatgcgcgtccgacctgctgctcacggggctcgtcttcggctgggcgccgctgctgctgctactgcaggaggaaggccagtaccacgagctctgcgcggacgccagtgagcccacgtgcgtggcccaagagaaccgcctcaacctcgttttcgccgtggcctccgtggccatgaacgccggcgcgctgcccgtcggcatgttcctcgaccgcgcggggccgcgcgtgaccatcgcggtggccgccgtcatcgaagtctcgggcctcgcaatgctggcgctcgcggactcgcagaccttcgacgtgttcgtgccggcctacgtgctcatcgccttcggaggctgcatcaccatgatggcgtcgtacccggccagcttcctcatcatgcgctaccagaccgcgatcctcgcggccatcagctgcctcttcgacggcagcagcgtcatgttcctcgtgttgtacgccgcccacgagcgcttcggatggtccagacaggagctgttcctgggactggcggtggtctcgacaggcgtctacttgctgctcatcttcctgtggggactcaacgagaagagtctgcgtcccaagcgcactcctgatgccagcggcaatgatgcgattctgtccacgccgcagcagcgagagcgattgctggtcaacggtcaagccaatgaaagcgcgtacggcagtgtggaggtggagcaggagcggcccaagcggatcccgtccacgccgacaatgtcaaaacacgatgatgcagccttccagctcgtggacgtcgccctcaccacgcagatgaagtcgttcgagtttgcgtacatcgtggtgtacgcggcggcgcaggtgctacgcgcgacgatctacatcggcacggcgaacaagctgctggacaactacggcgaccgcgagcatggctacctgtacaccaaggtgttcagcttcgtgctgccgatgggcttcctgttcgtaccgtctatcgattatctggtggagactcgcggactgtcgaaggcgctgctgttcaccaacatcctgggcgtgctctacaacgtggtggagctggtgccgatcctgccgctgcagtgcgtggccttcttcctgtttacagcgttccgcgcgttcctgtatgcaattatctcagccttcaccgcgaagacgtttgggctcaagaacatgggctcactcatgggcatcgtcttctcgatcggctcggtcatcagtctggccgagtacccggcgatgtacatctcgaacgtgctgttcgccggcgacctgacggtgctcaacgtggcgtcactgctgtcctgcgtgctgatgatcccgctgacgatgtacctgcgcaagtacgagcacgaccgcgaggagaagcgccgcgccgagatcgcgctcgagagcggcgtcgcccacgaccacgacgaccgtgagatgtactcgtcgctcatggacacgccgacgttcggcgtcacctaccttcggtcgcctggcaatgcgcctcacaacgatcccttctcgcctgaataggagcatcagcgcgtagttccatatccatagcgtaggcttttagagtatcaatgcatcaaccagttcaactcacatgtacatgtagccatctgcggcactcaatgggtccatggtacattgtaccacctggccccggaactcctgtttcagccaatcaaagtcgtccctcgattggtggcccccgccaagccagcatcattcattacgcggataccgccccgcgctgaaaaggaagccgtagacaagagcagcagcagcagccatggcgagcaggttctgggcaggaagctcgtcttccgaggaggagagcgacgtctcggacgtgtcggacgtcgagacgtcgcagcagcaggccgcgcgcgcggcctcgcgctgggcggtgcagtcggactcggagtcggatgaggaggtgcgcgtggtcaagagcgccaaggacaaggcgctggagaacatggagcgcaactgcgcgggcatcaagaaccacatgaagatcaacgactggacgcagatccagacggagttcgacgagctcgtgaagcagctcgagcgcgccaagaagacgctcaacacgctgcccacgttctacgtgcgcacgatggtggcgctcgaggacttcctcttcgagaaggtcaagaacaaggccgagcagaagaagatgagcaaggagaacagcaaggcgctgatccgcatgaagggcaagatcaagaagcagctcgagcccgtgcgcaagcagatcgacgacttccgcgtcaaccccgtcgagtcgagcgaggacgagtccgagagctcctccagcgagtccgagtccagcgactcggactcgagtgagtcgtcggcgtcgtcctcgtcgggctccgactcggacaagagcagcgacgagtccgagtccgaggaggagagcagcgacgacgacaagtccggctcggacgacgactcggacgcgtcggatgactcgtggcccagcaactcgtcgtcgtcctcgtcctcgtcggaggatgatgacaacatgcccaagggccgtgcgcgctggctcaagcagacccccgtggtgaccaaggccaagaaggtcaagggccccaaggtcatcaagcagcgcgagacccgccgcggatccgaggatgaggtcaagaaggtcgtggtcgaggaggagctcaagctcacccccagtcagttcgaccgacgcgtcaaggaggtggtcgcgatgcgtggtaagaagggcatggacctatcggagcagctcagcctcatgcgcaagctggccaactacgcgcgccgcctcggccccgcccgccagatcgtcgccaccatgtacctggtcggtacgtcggtgttcgacacctcgtccaagattgaccgcgtcatgtcggcgcgtcattggaagcaggtgcagtcggacgtgtgctcgatcctgtcgctgctggagaagaaccccgagttttcgctggccccgctgacgtcggaggaccaggccgacatcgtgcgtgccggccgcgagaaggtgacggctgcacagatcgctgctgccgccgctgaggacgctgaggaggacctgaacttcgtggacacgctgccgcaggccggtaagaagggcacgatcaaggtgtctggtgacctcgctgcgttcgtggaccgcctcacggaggagtacaccaagagcctgcagcagaccgacccgcacacgagcgagtacgttgctcgtctgtacgacgagagcctgctgatcgaggttgccgagcgtgtgcagaagttctacgcccgcaagaaagactacgcgcgcgccgccaccatggcgctggtgcgtgccgagctcatctactacaagcacgactccgttgcttcggccctgttcgaggcccaggccaagcgtgccaagttcggtgacccggtgttcctccaccctgcttgcacgagcgttaacgccaacaagacgaacgagttcgacgcgtccaagacgcaccctgcctccgttatgggccagccgagcgtggatgtgacccccgtggacgctgagaagctgctgcgcgacgtgtgccgcttcgtgttccagcacggcgacatccgtgccaagacgcgcgctatgctttgccgcatctaccaccacgcgctgcacgaccgcttccacgaggctcgcgatctgctgctgatgtcgcacatccaggacaacatcacggacgcggacatccctactcagattctgttcaaccgcatgatggctcagcttggtctgtgcgccttccgtagcggcctggtctgggaggcccacgcgtgtctgtcggagatctgcacgggctcccgcaccaaggagctgctcgcccagggcctgcagtcgttccgctacggcgagcgtgacctggagcaggagcgcctggagcgtcgtcgccaggtgccgtaccacatgcacatcaacctcgaactgctcgagacgtgccacctggtgagcgcgatgctgctggaggtgccgaacatggtgaactcgcgtctctcggaccgcaagcgcatggtgtccaaggctttccgcaagctgctcgagttccacgagcgcctcgtgttcgagggtcctcctgagaacccgcgtgaccacgtggttgcggccgccaagctgctggctcagggatcgtggcgtaagagctccgagcttctcgtcggcctgcccgtgtgggacctgttcccgggtgccaacgtcagtcaacgcgtgaagtcgatggtgcagcacaagatccaggtcgaggctctgcggacgtacctgctggcgttcagcgccgagtacgactcggtgagcctcgcccgccttatggagatgttcgaccttgacgagaagacggtgcacagcgtggtgtccaagatgatgatcaacgaggagctccagggcgcctgggaccagtcctcgcaggccatcgtcctgtacaagaccgagcgctcgacgctgcagactctggcggtgcagtactcggacaagctctcgcagatcgtggagaacaacgagcgcatgatggacctgcgctcgggcacgaacaaggaggaatggggcaaccgtggcaaccgtggcgatggtcgccgtggcgccggcggccgcatcggcttcagtgctggaggccgacgtggtgacaaccagggcggacgtggaggcttccgtcctcgtcgtggcggcggcagcggtggccgcggccccaggcagcagcgccagtagactatggccgcgtgctgagagctacacaacggaatcatatattggcgcggctctgtggttgatcaattcctcctagccgtcaatccgtctgtggctttcagttgtaggcggacggagaatgaatagcacgttgcagtttggctaaattacgatagttttcctagctaggggccatgctgtcgttgctgggcgcctccttccgtactgtacgcaatgcactggtaggcaggctgggcccagaaacgaagtgttagtattagtctgtcggtctggccgcacctggtgcatacaatacatgcttcatgtgaacttcaccccgctattgcgtgctttgctggtcaaaagagctgtcggatccaagctgctgccatttttgtttaccattattttgttttctccagcttttgctgcttttcactgcgttcctgagctcttgtgtgccgaaagaagccgaccccagacttccagtgacgccaactccacccacgacttgcttgctccaggaacaccaatacccaaatcgaccgacatcaaagctttgagatgaattgaaccagacggctatccactactcggtggcagcgacggcatccgacgaagcggcagcattcgcgctttctccacggcctccacggccgcgacctcgaccgcgtccgcgcccacgaccgaaatgccgccccctaccaccgcggccattcacctggccattctcacggggctcctccgcagagtcgccgtcttgcacctcctgcttgtcttcgtcgccgttacccaccgccttctttcttcctttcctcccacgcccgttcttccggttagacgacgtggatggcacgtcaccgtctacctgctccactgcactgctagcttctgcttggtcctctccgtcctcagcaggagttcgtccatgcgacttcttgccacgacctccattgctaccactgcggccacgaccccgtcctttgcctcgctttccgcgcgtggttggcgtggtagccgtagccccctcctcgccaggtgtctgctccgcctcagcctctgcatcttcagcagcctcttcttcctccgcttcagctgcagctgggacatctccacgtccagcgttgcggccggagcgtctggagtgtccgcgcgtcttcctgaactcccgcgagtcgtggtaggacggcgagctggccgtcacctggtccagcgggatggggctctggtagcccgggtcgtcccggtccagctcgtccagcgacagctggatggagatgccggggatgtggcgcgtggtctcgatgcggtcgaggccttcctccagcggctcgtacacgtccaccgtgtctatggacgagatgcgcgtcacctggtgcagactcggcacccggtgcttcaagatctcggccacggtcacggccttgctgatggcgttgcccatggccttcagcgtcacctgccgctcgctcttctcctggcaatgataaagaacatatatcatattagtaaatacactattgtaccatgatagaatttaataaataaacttacggcgaagagtccgttggcgtaggaaatgtagctgcgcactttgccctgctgcgtgatgcggatctcgttgggctcgacctgcgcggcctgctcctcgcgacgaggcttctccacacggcggtacttgtccatcgcggcggctgcgtgcagaggtgaagagcgagctcggagcttggctggagtttggctggagtttgatcaataataatgtgatggctgctgatgaaagatctgtggagtgttgaacaccaaccgagtgaagtaacccctggtgtggttcacatattgttacttcacacgaaatgggtacagatcaaagcaagttgaagtgattttttaatgatttttattatgctggtgacgttggagacgcggggcgtggactggagctgttggtgggcgagagcgcttggttgaggaagttcgacagctgccgcagtttgtcgtccgcctcgcgcttgctggcggctgcgactgcgcactcttgctgcagccgcgcgacgctctgctgggtggtgaccagactttcggtcatgttggtgatctgcgcgcgaagcaggagctcctcatggagcagctccctcgtttcgtctgcaacagtatcgaagttattagataatattaaggttattttctgctggacagtgtacgcctaccttcggtgtccatgatctccagcttggccttttgcagcgccttgcgcagaatgcgcatgacgcactcgtagcctcccacctccatcagtttcttttccgccagcaccttgttctgcacagcgatagcctccgactcgacgagtgcagcttcgtccttctccagttcctcgtgtcgcagtgccagcgcacacgcctccaccgtgagctgctctgccgcatccatcacggtcgcgatgtctctccgcgtcgcttgcagctgctgctccacatcctccacctcgtctcgagcgctatcgatccgcatgtagaactcattgctcgcagcgacgtccatggctgccagctagctagctaaacgacaataacatacaaccaagttgcacgtgtccctccagctatttacgggtctgctattgagccctaaaaataagttgaagtggggcgtatcttaccgtcgcaccccttcgaccaccgtggaaccgtcgcggccaatgaaacgtctgggaaacgacgtgtcggtttcaactgccaccggttgcccctccaccaaggctcggacccaggcccctcctctcgctcattctcgattccgctcccgccgttgcagagcctccacacacccacgcacgctttggaatcttcagtatctcttcagcagcatgtggggcggatctttctgcaaggccacagtactcgccatgatactgttgctacactcttcagccggcgcggagcaggatgggtgtcgctgcaagcggaccatgaaaggccgtgagcacctgcacacgctgccgaccatgtcgctggccgagacgcaggagctggagcagctccccaagcacctggactggtgcgagcgcggcttctgcgtgccgagctggaaccagcacatcccgcagtactgcggctcgtgcttcgcgcacggcgccatgtcgagcgcgcaggaccgcatcaagatcctcaacaagaagcgccactactcggtggcggacgtgatgctcggccgccagagcttcctcaactgcgcgccgggccacgggctgtccgacggctgtgacggcggagaagccgcggacgtatacgagttcatgcggcgctacggcctgccggacgagtcctgcctgccgtacaacgccacggaccacaccaagttccaggccaccaatggcacctgcccaccgcaaggatactgcatgaagtacgcgttgttgagtcatttcctacttcaaatttgacacttatctaacgtgatttttgctgtttgtgcagctgcatgtacactcctgagagcaagacggtgccgcagtgcttccctgtgaccaagatggtgcgttatcgagccaagagccacggccacttgtcgggcgagctggccatgatgaaggagatccagcggggcggccccatcacgtgcggcatcgcctgcagcgacgagttcacgtacgagtacaaggccggcattctggaggacaagacgggctttatggacattgaccacgacgtggagattgtcgggtggggagaagaggatggcgtcaagtactggcacgtccgcaactcgtggggcacgtactggggcatgaatggcttcttcaagatcgtgcgcggcaagaacaatctgggtatcgaggccgactgcgcctacatggagcccgacatcagcgacgaagagctcgtgtgggaggagaagtccatctacggagggtccatcttcggcattgtccccttcaaggagaccgcgaaggaccacccgatcaaggacacgagcgaggacgtcacgcgccgcgacgacgaggtcccgcctgctcactacttgcccgagacgaactccttcgcgaccgaagtcgagtctcgccacgacgacagctcgttcatcctgctcgctatgatgttcttcgtgtcgggctgcgtctgcgcggctctcgcggcggtgctcatcctcaagttccgtggccaccgctacgtctaccggacgatcccgtaaagcgggcaggttctttaccagcatttgaacctcacggttcatcctcacccatttcgtagacattgagactgtagagaacgagatgccagttctcactcactcaaccatttcacgtagtttgtcagcaacttcgccttcatttagcctaattcatcgctcaggattcctgacagggcactggaatgcttgttccgccccctgcctttagtcgcgtgagcattgtttaccgcagtcgctgcagcgactagaagagtggtctccgagtgggtaatcagcaggaacgtttgcctagcgtggcgctcaacgcgacgacgcgggcaaagtatcccctggccaaatgcgctctctagagctcaccggcgtaagcagcgtgggcaatggctggcagcaagcatgatggccatcaaggtgagcatcaagcaagacccggtaatggagtaaacggcggttaaccctgccggccaagttggccgccaacaccatcaactacgagcgcgttatatcgtccatctgctgttgctgctactgacacctgggcgctacgcgaacaggaggtgctggggctctgcgacaactgcaaggcgcttgactgccgcagcgcgtaaagtgcgctattcagcgaagagaagactgccatcgtgagtggcctcactgcagccgcacggtgtgtgtgcagcgaaaccaacggcgctggtagcgcacatctcgtttagctttaggttcggccgcgccccgcacccgctgtatgctcatttgcggagagcgccgcaaggtgttggccaatgtatcctgtccgaatcagcggttgtcgggagccggtgaccagcagtgcgctgcgcagtgtccaggtgcaacttgaaggcaccctcttttgtcaacactttttgttttatacttgaacaatcaatccctgagattttaacggttttatgctagtttgccacaacagggggtcgaaagtacccgacattcagcaccgttttttcagcaccgacacaaccgtgcagtctgacgatcagtcaattcatctgcttgcccggtggagcaatcgcccgagcagggcagggctcacttggcctcgtgtgtgtgtgcgtctgattgccacaacgcgcaaaaatccggactgcgttgacgcacggagaggaagagagctagagcgctgcagcaccgctgcactccgcaacagtcctagtggacagccaaacacgaggcaaaaggcaccttccaaccgcctggcaacgaacgatctactccgtctcacacctgctgcaccgcgccgcggcttgaaggcgtgtcacatctcatttcgacacgtagagcagcagagcgcaggtcaggtctccacgtcggaccattccccaatttcgttaataatgggcctcttacgcgcgttcatcggcctcggtccgcacacgaaggacctggtgcgctacggcaagaagttcgaggcccgcacagccgcggtcgaccagttccaatggagctacttgatgcgacccgcagccgaccccaagagtcgagagatcgtcgtgttcctgcacggcctcgggtcctcgaaggaggcctgggtgcgagtctccagcggcctcagcaaggactaccacgtcgtgatccccgacctgccgggccacggcaagaccacgcccttcgacaccaacatgaacttcgcagcggaccgacaagcgcgtcgcctgcacgagttcttcgagtcggagctgtatccgaacaacaaggtacatctcgtgggcacgtgcatgggcgccaccattgccggcgtctacgctgcgatgcacccgacgcgggtcaagtcgctgacgctcatgtgtccgtggggcatctccatgcccaacttgagcgtcacgctcagcgacgtcggcgactttggcaagttggtgccgcagagccccacggagacgtccacgagcgacgtcggcgactggcgcgaccgcgtgacggccagcagcgctgccaacttggtccatgcccccagagtgttccgtgccctcgcagtgtccaagttctccaagcgcggacgagcgcacgaggtgctgcagaaggttttggtggacatgctggcccacccgacgatcctagaggacgagttgcaccgtattcgagccaggaccatggtggtctggggcaaccaggacgacgtcctgagcgagtcgtgcctcaaggtgatcgacgagaagctcaacgtcgcgcgcaagaacgtcatgatcttcgacaagtgcggccacctcgtgccgagcgacaagcccgcggaatgcgtcgacatgctcaacaagttcctggcggacgaggagctgagcttcacgttcgctctcacgaagcaagagtccgtgatggcattctagtgcaggagtcgctacaaggagtagtcttcgccagatcgaatggcgtatttatcatttattaaccatttcagtaaaatgtacgtggtgaatctgtctacaagtcgagagctctgttgtcattgtcctttcgatcacggatagtgcggagtatggagagcgttagcgtgttcggggtcgaccccacgagcgagcgcaggttgaagcgtgtgatcgtgttttgcggtacggacacttggctgctgcaaactcatatgaccgctcgtttacgggtggcggagcgtctgtaaagccatctaatgcactcacttcaacgcatcagcggcgtgaacgtataattgaaaaggtgtgccgtcgtgaagaatagaataggctcagacaagccctctccttctgatcaattatttcagcgtcggaggagtggaatcgtaagaagtaaatggacgtggaggaacgatggataagaagatgatgaagaggagatttagttctcgccccgataacgctactattatacacctggtccaccggtaacattgaattgatgacggtacttgtctcctttgagcaaataaccattctaagatttgaagagagaagccccccacaacttttcttttacgaaagaggagataacagcgagtttggcatttatttccgcatcgaatttgaccaaggtaagatggtaaaaccccaagtagaaaattgggctttcgacaaatctagacacaccacgatttgagaaattttgccttttaggtcctgaaaacgcgtccttaatgcccgggatggcaacgaatagcgagtaataaggcaggggtacactctagtagccgtgaatagtgttcattgcccccaattgtcgagaaacctcttcatttggcttgaaattactgctttggtaggcttactttgctcgccagtaactaatgtgcacagaagaatctagccatcatgtttagctagttagagagaggaaatgacgtaccagaaggatacgaaatatttcaagcagaacaatgatgccggtggcaatacctcaaagtatttgtctgggctacccagttttactttttgaaccgtctattcatgctcctgccagcctccgcaggagctcggaatacgaatcgagcgtacatctcatgcattataactgcctgactacacttctaaacctctagcgctttagttttgctgagttcgccgctactcgcagttagaagctatcatccaagtctacacagcgcaagtgccttagatcgatgcacccctctccgcctgcactttgtactgtctatgatggacatatgtcgcactatacaaactttcatattaaaaataatctttacgcgcctactagtaggattgtacccatgctactggtatgctttcgacctggggagaagagattaagaaagatgccgaacccgctcttcttgccagcgatcgacgtacttatgtatgcgttttgctgctggctttacggcaaaacgaattcacgtagacaaagaagtaaattgcagttagcgaagtgctgtggtgtttttgcatgccgtcagctccatgcgggaagtgtggttgtgagttgccgcgcggacttgacaaatgacacttattatcatcccagatctacgcgcttgcccatttattccatgcccacttggtgggctgatcccgtaggcagcatactgaacttcagcagccatgtcaatcttgatgcaaataaaaaaactctccaattcaaacccgtgacagcactacatgcgctttgcattgatcttgagaagcggtttacagtgctggaaaagttgcatggcacttatgatgaaattttgcaagcgcgtcacttggatcggcatgttacatccttatcgcgagcaattttagcctcaagtgcatcgattatcgaagttatcttaggttttctgagacaccgctgcagccaacttgcacgctgaagcgatgatgagccggttccagaccgctttcgagcagttgaaggcgagatggatgtctctccaagtggaactccagggaagctacaccatcgagcgcttccatcggctgaacgactactcgcagcgagtaagcggcaagagaatagtccttatctctctgttgaccccactgccttgcatcgcgctgagtatcctgaaagaggtgccaccgttgaagccgaccgaagctggtgttttgggaaactgggtcttcttcattcgcgcttggatagtgagtgcgtttgtgggcggtagcattcccgtgatggtacaccaagatgtccctcgcctcacgatgacagctcctcagattgtttcggtggcactgctcgcgggtggaattgcaatgctgtttattggcgttgcttgtgccttgactgtgttcccgtggccgtttggagtgctaattgttggggttcccatgatgtgtgtggaggcgttctgtcatctgcggctagcggatcaccagctacgaggtgatagcgcgttatgggccgacgttaagcgagtgcttgccagtactcagtgtttcctttcacttcctttcatttatccgctctacatttacgggtttgtgtcgctctctggtaccggccaagtattgttcgttattgtactaccgatcatgaaactctttgccaaaaactggatgaacttcacactttctggtcgtgacgacattaaaccagagatgatcgtgttcgtagttgaagtgttcaactccctttatatctccagtgcgctgcaaaatacttcgtcctgggcatcgaccgccacagtcatgggctccgacttggcggggttctggctgtctatgatagatatcacggaggctttcacggagattcgaaaactcatgaagaagattccggaaaaccacaccctcaaaaacgagaacttcgttcaagtgttattaagaatcctcgcaaaacacgagatccaacatgaggtattgttcgttgcagtgctgcctgccatgcaatttgttgtcaagaattggatgaatttaacactagctgggcgcgatgacacgaagcccgaaatgatcgtcttcgtggtagaagtgtttaactcgctttatatttctaacgaacttcaaagtacttcgtcatgggcctccaccgccacagtcatggcatccgacattgctggcttctggttgtcaatggtggatatcgcggaggtcttcacagagatacaaaaactgatgaagaagattccgcaacatcatcccctcgcaaacgaagattttatgcaaatagcgttgaagcttctcgccgccagcgaggcaaatggagcccgcaacatcgccgctaaaacccctgaaagttccccgctgttccagaagaagacgaacctcgcgagagatcctaccaatgcaaccgctcggccgaaacgagaacagcacgcgcaatgtaattacgcaccgacgcatacattaattcagagccctcgggccatgccggtgggtttctccctaagcgctgaatccacgaaaagcaacgcaccaaaacgcttggctgacatggacattgaatccattttctcgcgaatggagcgagacctgttcattcaaaagagtatgcacgtactctttatcacagagttcgtcgtactattcgagtacatcgaagtgacgatatcaatcgtgtactgtaggtacgcgctgatatcgataggcacacccattgaggctaacgactgttggtatatgttgtcgagcaggtctattccgtgcagcgccgttccacttgccgaacagagcctacttctacacggtggccgggctttcaagctctgggcttacagcatccacactcacggtactagcctacacctctctcatcgtttgtggcatccgttgccgtgatgaaacgcgcattgggttttaatcccttgaggcaacttgcgttcgtgcttgagactcaagcgggcaggattcagacaaagctcgttgtgatccttctctacgttacgcaaatgccactggctgttaactttcttgcttaacggtttggatgggcttctaatgtggatgcgttgcaaggtgctgacttcagtttcaagtttgcatggattcctggtaactaagcaaccaattcattgtcaaggaggggagcaattctggggaacatcgtgtttatctgaatgattccgtgtacgtcgaagtggagaatagtttgaatcgggttcctatttgccacagttcgggccagcaaaaaaaacaaaaatcgtgatttgtcgaagctgatctttgaacaatttgttcctgcttatctgcagcctcaacataactcggccgtgcagtccatacaagcctgtcagcgaagtcctgcagccgaccactagtacttagctcagttttggcctgtttgggcgaggacgtggataagaatgtcaaaatgctatgttcacccgcactgaagacgatacttgccgccttgtaatcctcgtaccattcttaaattgaaagagaagaaagggcccagcggaaacccgcgcaagtttagtcgagatgccgcacccgctcttcctgtcggtagtcgacgcacttcgtttcgtttctggtttcacggcgaagaatgcaacagtcgacacgtgcaattggagcttcatcgagcgacgaagcaaggacgacaagtgcgacgacgttgtggtgttcttgcatggcttcagcagtatgagggaagcgtggctgcgagtggcgcgcggagtcgacaaacgcttcagcatcgtcatcccagatcttcctggtcacggtcgcaccacgcccagtgacgcgctttccgactattccatgggaactcaggctgagcgacttcataaattcctggagaatgaagtacctgcagaaaagaggattcaccttgttggctgctccatgggcggcatgctagccggagtgtacgctgggatgtacccggaacgggtgaagtcacttacgttggtgtgtcctgcggggatcacgatgcccaacaagagcgatctactgaagatgctggaaaattctggtcgtaatttattgcttgcacacacgcccgaagatattaaagagatgaacaaagccctccacttcaaaccagtgactgtaccgcatgcgctggcggcgatcatcgcatcggatcggaagaagcagctaccagtgttggagaagattatcggagactccctcgagaacccgatagcgctcgaggaactgctgcctaacattcgagccaagacgttggtcctgtggggaaagcacgaccgtgttctcgacgtctcgtgcgttgaagttctacgacagcagctgcatccagatacccagagtcaagttgttctcattgacgaatgcggccacctcgttcaacatgaaaaatacgcggagtgtagcgctgcgatcaacaagcacctagctgataacatgggtgcagattcgacaatgcaagggcaaagagcggccagcagtaagctcaagcaactcgcgatgtccgcacgccaaatcattccgagctatcgtcgattacaagcgccagcgcggagctcgtatgccgtacagtaagcgtggagattcctcgagtttgaaaacgtgaaacgtttttgaaagatacttagtctactacaaactgcctcttttacacgacgatggcgacaatcttctgaagtcttggatttaaagttcaattactgtatttctaagtggtatttgcaacccccccccctccagcgttccgaccgtttttactgatcaatcgaacaatttcatcagagtgaaagcgtagtcgagtttaaaagctgtgttacattcagtttgaaatataaaataattaaatatactttttacactgtatccgtaggtattggattcatcatgaactcgtcgtttgataaccaggtatccacgcgaacttgaaactaaagtcagctcctagcagcacatccacgttactaaaacagctctttcaaactaaaacatctaagccgagagtaagactcaccgagatgagctagcggcatctgtgtcacgtagagaagtatcacgataagctttatctgtattctgcacgcctgtgtatcaagtacaaatgcgagctgtctcaagggattgaaacccagcgtacgcttcatcacggcaaccgctatcacaaacgatataaactcgagcgagctgtaggcgagtaccgtgagtgtggacgacgctagctccgagcttgtaagcccctgcattgtcgagaagtagattcggtttggcaagtgaaacagtaccacgcgaaatagacctgctcatcaatacaacaaaccgtcgtcagtctcactaccggaaggatatcaagcgtgcatgttcctcgtactgtgcacaattggcgacatcacttcgatgtactcaaacagcacgacgtattccgtgatgaagagtacgtgcagactctttcgaatgaacaggtctcgctccttacgcgagaaaatggtctcaatattcatgtcagccaaggctgttgccgtggtgctcttcgttatttgacctttttcgagttggttctgggggatacttgctggtacgacttgagacccttgaaacaatttacgcttcggcacttccgagtaaacaatcatttcatgggttgtttccgtgtcggggtgaatggttgcaggggaagggtctctcgaaaggttggtcttctttgagctgtgtttactatccgtcttctgggtatcttgtcggtctttattcgcctcatttgctgcaaggatcctcaacaaaacttgaacaaagttttcctttgcgagtggatgatgttgtggaatcttctccatcagctttgtgataccgatgaaaacctccacgatttccaccatggacagacagaaacccccaaggtcggatgccatgacggtggcggttgacatccaagacgaggtgctttgcagcgcgttggaaatatacagcgagttgaagaattccaccacgaagacgatcatttcgggcttggcctcgtcttgaccagttaaggtgaagttcatccagtttttggcgataagcttcatgataggcagcactgcaacgaacaacacttgggcggtgcctgacagcgacacaaactcgtagatgtagagtgggtagatgaagggaagcgagagaaaacagtgaacgccggcgagcacttgcttgacgtcggcccataacgcgctgtcacttcggagctgatgatctgctaatctcaagtggcaaaatgcctccacacacatcatgggaaccccgacaattaagaccccgaatggccacgggaagaaggtgaactcacacaccacgccaataaaaatcatcgcaactccagccgcaaacagcgagacgcagacaatctgcggaatagtcacgacaaggcgaggaacgtcctggtttatcatcaagggaatgctcccgcccaccatcgcagccacgagccaacctcgaataaagaagacccagttgtcgacaacaccaacgtcgatcggctctaggggtggcagctctttcaggatgctcagcaggatgcaaggcagaggcgtaagtagtacggtaaggatgattctcgtgacgcttactcgctgggagtagtcgttcagccggtggaagcgatcgatagtgtagtttcatgggagttccacttggagagacatccatctcgccttcaagcgctcgatagcggcccggagccgcttcgtcatggcaaccatttcgctttaagtccacacctctgacgagactggcaaaaaatgtgccaacaatagctctgccggacacacgttttgcagaatgttggtcttcaagttgcagcgaaatgatggtcggcgtcaagtaaacattattgcccaatcaacatggccatagagttgaatatccaccaatcataccgtcatcgttttctgcgacactgcgaggacgtgcgtggagcattgcgcgtggccagcattgacacattcgccgactacccgccaccctgcccagcatgatggcctcgctgcttatgtccgtctttgacgttgtgcgcttcgtctcgggcttctcgtccaagaacgccatcgtcgaccagtacaactggagctacatcgagcggcccggcaaggacgagaaggaggacgtcgtcgtgtttctccacggcttcagctcagtcaaggagtcgtgggtccgggtggcccgcggcgtggacaagcgctacaagatcgtgatcccggacctgcccggccaaggccgcaccacacccgtcgacacgctggccaactactcgatgcccagccaggcctcgaggctgcacgagttcctccaaaaggaggtgcccgcggacaagaagattcatcttgtgggctgctctatgggcggcatgctcgccggagtgtacgcggggatgtacccggagcgtatcaagtccctcaccatggtgtgtcctgcgggcatctccatgcccaagaagagcacgctactgaaaatgctcgaggactcgggacggaacctgttgctcgcccatacagcggaagatctcgatgagatgaaccgtcacctcagctatgaaccgcatagaatcccgcacctgttcctgaacgttttcgcctcggaacgagagaagcagttgcctgtgctggagaagatcgtcggagactcgttgcagaacccgaccgtgttggaagatttgttgccgaatattcgcgctagaacgttggtgatgtggggaaagcatgaccaggtgcttgacgtgtcctcggtggatgtgctgaaggagaaactggcaccggaggcgcgaggaccggtactgctctttgacgactgcggacacattctgcaacacgagaagcacgccgagtgtacgactgcgatcaacaagttcttggcgggcgaagcgttctcagtcaagaacctcatgtaaaaagataatatagatgcttctttatcaatttttttaaagtaggcgccaaagagacgagtcttgcacaagacgagcagatttgttttgctcacgaggaacgttttgtattttttttagttttgttatgttcacatgaaacaaatgcatttgactagatccttgtgacgatcttgtcgctcgttgtggtggataacgcgtgaattaattgtggtgatcgaagtgttcctcgacttttggcaacgctgcacacctcttactccgacagaagtgcgttcacggcgccgccgacgttcccgtccgccaattccagcgcgcgaagattcttctcctggtcgacgaagcccatcgatgcaagcagatcgagtgcctccttgtagtccgccttgtcctcgttctcactgagctcgccttcttcggcaactgcatcagcttcctgcgcttcagcggagtcaataatctcgatgtcatcgtcggacgcagcatcagcggaagcgtccttgatctcaacgtcttcagcactgtctgccgttggagcctcagacggagtcgtctccggggcggcatctccagcggccaccacgacgtcgatccagaagcggtggccaaagctcacgtccgccgggtcacacacgcgccagaagctggtgtagcgtccaggttcactgggagccaccaggtccactccggcaataaactcctcgccgggtgccaactccggcaggtcgatacggctcgattctctgtcatcggggaacatcggattgcccggctgagtgatcatgtagcagccatcgggccaggaacgctcgccgtcgttcacgagtttccacatcttgcgcaacggctttccggcctcgacgaccgtgccgtcctcgatggtcacgtcctcaaggaagcgtgcttcaagatcggaggtattgcggccccagcggccacgtccacgacaaccatggcggcggcgacctcgctcaccatcctcttggtcttcttcgccgactgggaagcgcgcatagcgtccatggcgtccgtggtggcctgggaatccacggcaatcaaacttcggcgggaactcgggtggacagggcggcgggccatgcgggtgggggaatccaaatggagggggactgaagcttccgaagctgccgggaggaccaaacggagggggtccgtggtggtggcgcccacgacgatcgaaaaactccggcggcgggggaggtgggtagtggccgtagcggcctcgtccgccgaagtcaggagggcctccatggtgaggcggcggcgggaaatcgggacgaccatcgaagtgaggcggaggcggaaaaccttcatggtgaggcggagggccatgtccagggaatccgcgggagccttcgtgatggggtggcgggccgtgtctgggaaagccgggaggaccctcatggtgaggcggtcggccaaagcactcgggcggaccgtggtggtgagggggtggcccgtggaagggcaagcctggagggccgtggtggccatggcggccgaatttgccatgatgtccatggtggccgaacttcccgtggcgtccgtggtacccaaacttgccacggtggtgtccgaacttgtcgtggtggccaaacgtcccgcgacggcacgtgaacttcaacgcgtgcatcattcctggctcttcgatcttggtgaacggtccgtgcgactcgttccacttgctgctcgcctcgcaggcctcgcacaggtcgaagtcctccgccgtcttcgacttgaagcggatgcccacaagggggctcatctcgcatccatcgcagataacgaaaggatgcaccaactcggtcgggcgcttgtgcttcggcgcgcgcgacgggtccgtgatcttgataaacggctcgtggctcacccacttgccgctggcctcgcagtcctcacacagatcaaagtcttcaacttccagcgacctgtagcggacgccaaccaccggcgccttctcacagccatcacatatgactccaaggtgcaccggcatctcctccacttcagctagagcagcctctatgatctcatcattagagtcggctctagagctgctgctactgctgctactggagcttgacgcgtccgagccgtcttcggccagctcttcatcattgtagcggaccaggccagacatgcacttcttggccacgttcaccatcgccggcttgagcgtggggcagcgggccaccacgcgctggaagaaggccagcagttcgtcgaagcgggccgtggccgtctcctcaatggcctgggcgtcgtcttggtagatggccgccaccatggcgtcggccaggtccttgaactcctccgacgcactcagctcgtccaccacttggcggaactcatcgccctgcagcaccgccagcagctcgcgcttgaccgcggccagctccgtcgagtcgtcggccacgtccatcgtctgcaggctggccaccagcaggttcacggcgttggccggcgtgggctgcttgggcttgtccgtcgtcagcttggccatggccgtcaccaggccgcgcagttgcttctgcagggcgccggccggcgggccgtgcacggccacgagcagcgtcaggcgctccaggcgctcgtcggccatgtagtcggccagctccttcacgtccgcgtcgcgggccacggtgacctcgtcgccgtccgagtccgtgtagcgcagcgagaagccgtggttgtcgccggccagcagcgcggccgccgcggcccgaagcgtggccaccgtcagcagcgcgccgtcatccgcggccagcggcagcgactgcgtgagcgggtcaccgccgggcgcagtgagctcgatcaccttcgtcatcttcgatctcccgggtccggtctctcgacttgaggagggcgaggagaaatgagatctggcgagaacatcggggcgcccaaactttccttcgcgttggacagttgggtttaaccgttggaatgatggtaacagaaaccgtagccactttgcttttgcacggatccttctggaagacggctcagttttcagtgccgagcttactgtagtacatgtgcgtgaagattcaggcattctgcagcatgaatgctggcgtctggcacttgtaggcagcaggcaatgcgtcgaccattccagaagcaataggtcgtggtggcaaacgccaggagaagcgagtaaacaacagcgacgaagtcgtgcttacgagcgctgcgattttctgatacgaagagatagcagccattgtgacgtgttgccttcaacttcgcttatccctctcttatagcctaccctatgcttttgggcagtccctgagtattcttcctcgaatcctcgaattctgagaaaacagcacaaaaggagaacaacctccaagaggagaatctctgcattagctcaactaacccagtaacgccatgacgacgctcaagatctcgtggaaggagaagcaggacatgcgccgcgtgcaggtggccgccgtgcaccaggcgctggcggcccgggacggccgcgcgccggccggccgcagcgagctgagcttccgcgagctgcgcgactacgtgctgctggtgttcccggagctcgcgcagccctcaagcgagctgctgctgtgctacatcgacgacgacgacgagcaggtgcgcatcaccaacgacgcggagctggacgaggccttccgcctcatgcgcgagctggccgtggccgccggcaaggacgcggacaacgccgtgtgcaagatcatcgtggtggcccggccgctgcagcccgcggccatgatggaccccagcagcagctccatggtgcacgtgctgcccggcgacgccgaggagatgatgctcagccagcagaagaagaagatgtcggacctgttcgtggacctgggcaaggtcgtggagaagtgggacgctagtagtgagcaccagacgctcaagaaggacctggtgtcgctgctgcacgagcccggctgccaggaggcgctcatggagatcatggccaatgccaaggtggggtagagggttctgctgtatgggagtgggggctgtattgacagtatttcaattgttattgtagtttgcgacgctgttccagaccgtgacggaggagttccagaagaacggcaacttcatggagtgtctggtggctgtggccggcactggagacttggagggggtggccaagatcctgctggccaagtgccccaacgcccgcgtgcaggtggagcgggtgctgcagcaagtgcagtacagccacaacgcgcagctcatgtcggccagtgactacttcgaggccatcaacattgaagagaccaaacaggacctgggcccggttgtggccgtgttcgagggcgacgtcacctgccccgacggcacggtgctggcccccggagagccgtttgacaaggtgtggaagctccgcaatggcggccccaacaagtggcctatcggtgcggaactcttgtgcgtgggcggtgacaagatgcaagcccctgaaagcgtgctgatcccgtcggtgctgcctggcaagtctattgacgtgtcgcttcgcatggtggccccggcaaagcccggccggtacactggatactggcgcctgagcactcccgacggcaaccgcttcggccagcgtctctgggtcgacatcaacgtgatggagccgaaagagccagcaaccgtcgccgttgagacgaaggaggttcgtgtcgacgcccccgctgcggtcgtctcgacggctggcgcatcggtgaacgttccggcgcccgctgctgtgttgacgaacaacgatgaggagctccggtggacgaaccagcttcaggccttggccgacatgggattcacggacatggatcgcaacgtggctctgctgactcaacacaacggcgacatggacgccgtcattacgggacttttgagttctgtctaagtgagggaggttgatccctttgacccctttacccacctttgccggcgaacgaactgaagtggtcgcgcttgggacggctcccaaaagtttgtgtggaaggcatttccttcttcacgacagcgtacattacattgaaacttcaaaacatttcctttcactttactccgggagttggtttgtatctgcctgagcaatagtcgtcttcatgagttcaacgagctgcaccacgagctcttctacagcatcgctgctagcccgcactgttagaacggtctttgatgtcgccgccgtgacatccaccgtcgccaagaagaaccacgagtgatctcgttgcttcgcgtagaagacgtacttctcaatgccgttgacggtcccgctagccatacacgagattccatgcgcctccatcttcttcaccagcgtatccgactccagcctgttggtatcaggtaactcgtcttggaacctaatggcatttactcacgttagtcttggaacactccagcacattacgaatcactttcacatacctttcgacgtattcgtcccacatgctttcgaaccgctttgggtgaagccttgccttgcgatcgaggtctaggcgcagcttcttcggcgccatcgatttaggaacggctagcggtgtaggcttagtggtaggagcagcagcacgaggcgggggtggtggtggtggggccttccacttcatagtgatcgcaggcatcctgtaaacagagagtcaaattattaggtgcagagatcctttgactgagttcgtagtaacttactttgctcgaagtgctgaagcaggcttccctgaggcactagagttactgttaggtgcacttgttgtcgcaggctttttgatgagactgcaatgagaccatacgaactaaagagttagagtacacataacaactactgtagagatcatcaaattgtgccccaacgacgaacgtacctttccatttcgatgtgatcttctccctttttggaaatcgcagcccgactggaggctacgcgatttgataccggcttcgccgatgtcctaccgcccgatccgtgagtgtgtttcttactgggtgagcggaagcagctagtgacaacacgtcccacgaggcgaacactgggccgcttgcgtcgaatatacagcgtcactgcaagccccaccgccacggcgattgccatggagccaactataccaaacacaaagatatcagaacaactgcacaccaacagcacacatctgaatgacgcaacgcaccttgccaagtcgcgtacgggaaggatgaaaacagcgcttggccgctcgtcgaatcaagcgagaagcggtcgaagagactgtcttcgccttgaggctcaactgcttcttctctcgcgagaaacttcttgccatcaagtataccttcaaacacgtgcgatcgaaagccgctgtgtgaaatatacagctcatagctcttggtcgagtccaccgccgctccagtaatcgccttgaatgacacgacctcgctcgtatcaggcagcaccgccgccggtgtgaccaacggtagaacgatcccctccgccttatcctccttcgctcgagttcctcccttctccaccagcgtcaaccggtacaaatgcaacggtgtcttgccgccgttcttcacatgcagctgcacgtgggtgaagaacgtctgctccttggtcggttcactcactcctccatcctcttcatcgcctccgtccgaccaaatgagcgtctcccctagaataaactgcggcagtccactgccactggtcggtaggtcgtacgccggggagaccggaacatgtcgtaccatgcccgtggtttggtcgaacgagaccctcttctccgtctcaaagagcctctccacctgtcgcttggtctcgtgaccccaggcctccagactctcctccacctccatgttagacctggagcacaccgacgcgatccccagcagggcgatcgtggaggactcgacgtcctccggctccagcacgcagtccaccgcgtgcagcgaatacgtccgcagggacgacttcaagtggccaaccaccgcgttcatgggcgagctgcgcagacaccctttgccggcggacgcatccacctgtccgcccattgcgttctccacgtcgcggctcgggaacgcgatgtcgatgcccacgtccaggcagaagacgggaggcgccgcgtcgtccgctggaatgtccttgatctgaggcgccaggctgcgcagagagcccggaacttcggcggcggaggcgtggagggtattgcctagatggagatggaacaacaggcagagcgggagaagtacatggagccgcagcggcgcgagccgccataggtcgcgcatggtatggtgatcaacgctggaaggctgttcgatatctctctcttcaaatcgcagcgtaattcagagtagcaaatccgagtaattatgcacagaattagagataaaactgaggatctgcccccgattgtgtttcatttcaatttcgagccgagaagcatggctgacgctgaggagaagcgtcgcgcgccggaggttgttgacctggtggacgacgaggacggagacaacgatacccacaatgaagaagaagacgtcatggaggacaccgaggaggacgctgtgagtcgatagagaaagtgtacagtactgaagtgattggaccattattccactaacttgcaacttcatcattgtcctgttgtactgtactgtgccatacgcagtgctgcatctgccaggacctggtggacgtcctgaagcagggggtcctgtccgggtgcgaccaccgcttccacttcgactgcatcgtggcctgggccaaggtgaccaacctctgtccgctctgcaagaccaagttcaactcggtcacccggcaggacgcgcagggcgtcgtggtgcaccgagaggccatcctcgaccacaagcaggtgtaccgaccggacccatcggaccacgacattgccgcccaattgaggctcgtgaaccaggcgaggtgcgagctatgcggctctggggaggacgagcacgtgctgctgctgtgtgaagcgctgggctgcggggtggccaaccacacgtactgcattggactgcgggccgtgcccaatacgtcgtggtactgctccagacatgccactacgcagcagagagcgagcgacgctattgtacgcccggcgacgacggtgtccacgcgccgtcggacgcgaagactggccagtttgatgtcgaacgtgctcggtgggcgtagggaaactacagcgacgagagctcggcgacgaggaaacccaaactttgtggcggtgggggaggcagaggacagacgaccgatgcgcgggatcgccgcggcgtatgcgctgcgcatgtcgcgagagctcatgcaggtgcaactgcgcgctgacgccatgtttgcgcgtggagacttgacgcagtcgtctttgtatggtcggaggggtggaagcgatgccagtgctgctcgtaatggaacaaggtcgaccataacacagtccggttcgtcggctatcgaccaaatgtgggaagatcatagtcgaagcagacaggaactcgcagcggctgcgattgcagcgcatgatcacgggtctggaggagataatgggggtacgcggccaagccagcgcagcaacagtgtgtccaatacgttcgctccggagtattgcgagctagccaagctgatgcaggatgcagtcagtagcgacaactatgcgtcgtctgtgactctgctgatccccaagacggccaagctgaggctggtatctcgagtgaaaaccttctttggccgactcaaccagaaggagaaggccgctgcagttgaactgggatgtctggcggtgctgcatcagtggattcgcgtggccgaacaggaaggtggcaataccgtctctgcgcccaatcctcaagtgctggatgcagtgctcgggatattggagacgcttcccgtccgaaaagaagatctcgtggaggtaagcacgcatgtcgtagactttatcatatgaattagcttagctgatcagtattgttgatttttaggagcaggggttgcaagacactatggacaggctttcggaactttctgatgtgagcattgaaaatcggcagcggattatcgagctcagtgaaaagtggcgtgagctgaaccctccagcgccagttgagccacctcggtccccagtaaacccacaagtgtcgtcgccagttaacgcagcgcagaatttgcctgtaataacagccttcacctctccaaagcgaccagcgcgatcaagtagcaagcggaagcgaaagcgcgaagcgtacgtacctccctcctttattgcagttgtctacggtctgagctaatgtgaacctctgcgtgcgagcagctggtcggataccgttgtcgagtacgtgaaggcaaagctgtatccgctttacaagcagagcgacggggccggcaagttaacgaaagaccggttcaaggcgattgttaaggaagtggcggagctgttctcgcaagaagcagcgtccatgcagtcagcgttgctgctgccatccggggaattgtccaacctcgccaagtcacgtgtcaagaaactcatcgacagagtgtacaaggcgtccgcaagcggggctcctggtcgcggagctagtgccccaactccgttgcttatgcgcgcagctgtgccggcatcaacgtactctgcagtcccgtctatcaagcatcaacgaagaagataaaggcaagatttcaggcacggcaccttttcaagggaagaaaggaacaactaatactcaaactcgactgtacacttggatacacatacattaacaaaacgagaccatttagccgagccgttaaagagcccagtaatttcttttccaacttctcacgacaggtacactccaagggcagccgagtcctcctgcgagatcccggcatcgttcagccgcttcttctgaatcatttgctccaccatccactccgtcttcatcttctgcgtcgtcatcttcgcctgctggagctgctcctgcgccaacgcgagttgcaccgcatgcagctcactattccgctgttcgcgcttggtttcaaggtccaaacgccggctttcgacctccagacgcgcagcttggatacttagtttccttctcagatactccgtcgaccccttcccgacctgttgcgtgctcgaactcccaggtcgcgccacctccggcgtcgtagcagcattgccatgttctcccccgtcattctcctgccttgcgctcgccaccctttgtctcttgattgtcgactggaaactctgaggagtctcaacctccacttcattggccggagggatgggagcaggaacagtaaccggagcaggagcgggggcaggcacggacatcactgcaaccggcactggggtctgcgtgtgagtctggttctgcacttgagcttgaagctgcggcatggacacaggcggagtcaacggcgcaggctgcatcatcccaacactggcgaaaatctgctgctgttgttgctgctgctgctgctgttgctgcgccgccgtactcacataagtaccctgctgcggctggtgctgttgatgatccacataaatctcctgaggctgaggctgaggctgaggctgatgtggttgctgctgctgtccagcattgtccctgtagacgtcctgcggctgctgaggttgctgtccactattgtccctgtagacgtcttgtggctgctgtccactattgtctcggtagacgtcctgtgtctgaatctgctgctgctgttgctgtggctgctgctgttcacctctgtagatgtcatggggctggcccgagttgttattgccgtagatatcgtggggctgttgctgcggctgctgttggtctccgctattgacgtagatgttctgcagctccgacgtggacgtgggcacgaagagcacgggctcctccagcggcggctcgagcgcctgctgctggttgtgaggctgagactgagccggagcctgatgcggctgcgtctgagtctgctcctggtcgtgcgagagcagcaccttgacgaaggcctccttgttgcggcggcgcgggttcgtcttgagctggcgctgcgtgatctcgcgcttgagctgcgacagcgaccaatccttgtagtcgtccgagcgcgggggcgagcagcgctcgtcgcccttggcggaccacagccgagacaccttgggcgcgctccagctcgacgacggagcgttcatcaggaggtccctttggggcggagtaactgtgcattgatttgcggcaagatcatggaatagcataattcagttgtacgcaattgggtaggttggtatgctaaaacgggaaactttttgcgaagtctcgatgtctttgagccgtacgtatgaatgacccgtcaaggcttcgttgagaggtaagtatgaatgacccggtgatcctaggtatattatactcgtaaagttttcgatgatcgtgtatgatacacgagcatcgaaaactttacgaaggagctatacgctgacacgtctcaagccgtaagtatgaatgacccgtcaaggcttcgttgagaggcccgcatgcgcctattgtaaatcacggcatcagcaacttcatgggggcattttcgcccttcggttagattggctaacggcaacaaaacaaactaccgcacaaaagctaccacacctccgtggtttcatgtcagttcctcaacctcggagaaaggtttacaaggttaaaacgttttgaggcatgcacttcatctcccttcaggagattaagcacttgctgcgattcgcagctgggtggcgtgtttccttcatggctacagtacgccaagtcgtcttgcatgtcatggtgcgctattgtaccccgcacaatacctatctagctacatcaagtcggtcattcctcatagactatgacgcagaagttggcgtgttatccctaagataggatcacggtactatgactcatagtaccgtgatctatcttagggataacacgccaacttctgcgtcatcattgatcacccagtgccttactcacaatattctctcacgccgaactcccacattgtacaaacgcgatttacgagtccaattccccactcttcacttcgctttccacccagagtcccccacaattcgagcgagagtggcgtccaggatgctgagggcgttggcagttttcgccttcgccgcagttcgccacgttgcttcggacagctcagcgaagcgttcggaggtcctcacggcggtggattctccgacgagggctcaatcgtgaggttgttggtggtcaagttcttctgtattccagctaaagtaagaagcctttaataagcgcgagattaatgtgggcgactagataacggaggagcttaatggacgtcggaacgaggatcttcccgcaaggcacagcggagagagagatgtcatcgaatcgatgacatcgatgaggctgccccgaatcttgcccggctcatttagtgtacagaagtttcggacaggccacatgccctcggccacatgctttcaatgccgcgacgctgtgctgttcgtaccgaaagcggaggaagactttccgccttccagcatggataccggtagctctacgtctcaaatgatatttttcttaagaccgttttaactctttaactgcaaattcaaggcattgggatgagttcacatacttatgaagatcatgcagcactcgcttgctccaacaccagaccaacaacaaactgacgaagtgcaagcgacagcaaatcatttctctatccgtttgggcaaaggtctcgtttgagacgggcacccgatgtccctatcattctcggttctccagtctcgagtgcacacgtagtgtgcttagactcgaacttgcaggccgggactcactcgtatatcatggcccttccagttatggtcacagctctccaggttatcgtgttcacagtgctgctcgcagtccaagaggtaacttcggacgatgttagacttctccgaccaagcgtcggtcgtgtccggacagaccgtcacctccatcaccatccgggcgggtgaccgcgcttggggatatcggcacctacagctcagacattcacacatggaggaaatggcggaaccgacaacactctcgcttgcagagggtgagaacatcaattatatagaggctcattggggcgagaaggacggccacacgagagtattctacctaaacttcggaacaagtgctggcaactcggtctctggcggctcacagaccgactcgaagggatcagtgtcagcacccgaggggtatcaactgggagggttctttagacgtgacggcgatgaaatcgatacgctgggcgctatctggtcgagtattcaagctgcagatgacactccaggcacagtcgctccgaccgacatactggatagtacagcaggatcagcttcagcggcagctccgcctgccacctccgaacctgcacctacggccacttcaggttctagccctatgagtgcaccagcgtctgctaccggatcaggatccgcaccagctccagctccagcggctccaagttcgcccaaatcgtcagcaggttcaggatctgctgctccagtagctccagctccgtccggatcttcaggctccagtgccccagcgccttccggtcctgcagtgcggctcagtgagacctttggtggtccccatggtaacgaattcacggatcaagccgccgctacgtcaggccagactatcacttcgctctctgttcgtggtgccgcccgcattgacggtctcactcttgaagtttctggaccaaaacctcagacgttcacccacggaggcactggaggagatccgtacacgctcaagctcggcgaaggcgagtttatcacgtcgatggaagctcactggggtcagaaggaaggccatactcgcatctttaccaaaacttcggtacgagtgccggtaactccgtctcggcaggaacgcagacggatgaaaagggctcagttactgcccctgacggctatcaacttggagggttcttcggtcgtgacggtgacgagatcgacctccttggagtcgtatggactagcattgctgtcgtgaaggatgctccccctacgtcaggctcaggaacggcagccagtgcggcagtggacgtgtcggaccaagacattgtactcagtgacccctcacggcaacgcgttctcggatatcgactcgatcaagttcttgcagactgtaagttcgatcacgatccgctctgataagcgcgtggacgctatcacgttgcaagtcctggcggtaaggttttaaacaggtcttatgcaggtctggtctgtcttggtccgtaggaccaaaacaggaccgaaataaaattagcctccaaatgggaactaaaaaatatcctaacaaaactaggtttttaaaaaaactctataattgtattggtaaacggaaattagatgtattatgtattggaagggaaattgcataataagcaaaccgtgtcagggccttcaacctgctgtcaaccgttaattgtcggtcatgctgcgggtaacccggcttgtacgtcgctcgactctggctgcccgggccgtccgacttggtctatccacttgggcttcctgggaacgcatcgatgctagacctccatgatcacccctgccacctcgagttgaagctttacgaccaccgcgagttgaagctgtacgaccaccgcgagttgaagcagcacgaccagcgtgactggttcgtgagttcgacgacctactggcttcacgacgcgcagcgttaacacgcgatgtcaagtcgaccacaactggcaactcgatctcctcgtgagctggggcaacagctctgcgattagagatatcgccaagccgttgcacgtaccgccgcgataacgtgtcgattgtcgatacgaaagcggggatgcttgggtgtggcgcagcgatggctgcgttgagttcccggttgatccgctccagggggttgttggttcggcttaccactcccaaatccatgccataaacattccacacatcgactggaaaaatgttgatccatgtccgacgaaagtacttccagaaacgatcccacccaaccgccgagtactcaatctcttcggtacggcagcgagacataatcaactcggagacatagttgattccgtggggatcgacatgagcaggtacgatcacggttagcatgtccaacacgccgacttccatcccaatcgagatctcctggggtcggatacgcaacttcatcatgcgtcgtcgggtcgcttgcttgaagtgaaacaagcatccgatgaccctggcgtgcggaaactggtcggtcactgaatcgatcagcgctgcctcgaagtcgcagacgacactcccaggttgaaggcgactaaccgtgcagtcattcatgaaccgcattaacttttggtatagttgatgggttttgccagtcgtaagagcgtaaacgcaaggcacgaacacgccacttgctgcgtcgctcaccatcaacacgacacactggtagaacgacctcgggacgcaccggaaagttccgtcgacgaatattacctagcccggataccgaagtaactccagcagtcgagcgtccgcccaacccagcacacgctgtagccgctcgtcctccgtaaagacgtggtggaactggaaaaaattcaatgtagtcccttgaaccaggctctgcggtgcaaccttaaccattccatgcacgtttccaccgaaatgaacacgtctcgtgcggtacatatgttgccggacttgatgtcgtgtcagtccttgaacaaccgcgctgtcgtctctgacgaacaactgctcgcggaccgccaacgaaatctgttgcgccgtgtgtgaaaggtgccgaatcgacaatcgatcaacctcggccttcatttcctcggtgacgtcaacgtatcggcttggagcttggcccgtcccttcacaagtgtgtggcgtaaaattgtagaacacatctcgcgcaaaactgtagtcgactttccctttgcaccccggagtacgtcggtaaaagctgcaccggaaggaaatcttgcgcgaggattctcgggctttcgtgtactgatggccgttgagttggatgacggtgcgatgcgctgtcgcgacgaggtcgattcccgcatgcacttgacgccctgacgcagaaggttgaactgcgagctcgtcgccttcgtcctcactgctaacagtctccacttcagggtcgtatgcgtcagagtcgtccaaacagctgctggcttcgctgtcgtccatgtcatagcgggaagaaccgagaacaagtccaccgggcagcctggtcacatccccttgagtggacacgcttgagccaccgctggagaccgagtcatcgtcaacttcaatatctcgcgggggagtcccagccggcgagtcttcatcatcgctgtcgtcatcactgctgaaacagggttctcgatccccataaacaggagagatatagacagcatcgctgtcagcatcactgttgctcgccgacgctcctccacgatccgaattgaagccaaattcccactgctggtcgaattcaccgtcgctgtggtggcttgaagaggtcggagttgatgcggtggtggttcgcatcacgacttgacgcagaccaggggttgcagggtggaggcggcgaaggcgaagagctggtgggttgtcagaaaaaatccgaatgaacacaaattcacaccgttagagcaaagcccaacagcagcaaaagtttttgttaccagtcgaaacctacgtaactactggtatgtttggacacccccgttcaatcgcataatgttactaatagatcgagttattttagccaataagtgtccgtcagtattcgaacttgcgtattcttagcagcacaatcccacggaacggaatttggcgctccctgttcaatcgcatagcgcttgagaatgttcagaaatctagcctataggaagccttcactatagaaagttttccgtttttgtcttttcagtgtcgatatacaacttcccaaccctggacaatctcatgatgttgggaataaatagtctaaagatttgaaatagacaataaggccgatttttgatggaatagttccaccatgcaataatattaaaaatcttgggatgttctaagggtagcaccctgttacatagaccacctctgtaagcctaaacttggaatggcccaaactacgatttagatcgagattttgagatccagtcttcagtccggtacacttactactctcagcaaactaacggtgatttgaatataacaaacattggatgaaggggccagctctgatcaaatggcgactaccgctttaccgggcgctgctaaaggggtggctagcccctccatttgtcgtcgttgcctttacatagccttttttaaccgcctattcaaacgatagtaatagcttcgtaaacttaaaggtcctcgatactaaacgtacgaggaagataaattgatttagaaattatcctatattgaccaattctacctttagtacaccattcccattgttgttatgcaatattcgtctatcacacggacatgtaccgaatatcagacatgttgtgaaccaaattataatccccagcagtactatactaagctctatcatctactactactactaaatatcacgatattatatcaaagtgaagagggtctaaaattagcgtgtttcgtagtgataccatttgggtctcggcatccaccggggaaatcatacttatttcccgttcggtctcgtttagatgtcgtaggaccaaaacaggaccagacctgcataagacctgtttaaaaatcttcccagtggagctgacgatgtctcacggaggcaaaggtggagaggacaagacgctcacgcttgcccctggggaatacgtcacgtcaatggaggctcattggggcaagaaagatgaccacacgcgcgtattctacctcaacttcgagacgaacaagggtaactcgatctctggaggcacgacaacagacgacaacgcagtagctaaagctcccgacgggtttcaactcgctgggttttacggccgcgcggaggacggggttgatcaactgggggctatttggacgaggatttccgctaaggatctagagctcacggacgaggaggacagctctggctccggtgtcatgtacggaactaccatccgcaactgggtgggacccaccatcggaacgtcctctgatacagcctgctatcgtaagtcggtggacttcgacagcaagaacatttgcccgctaggatacggcaaggaggacaccaactgccaggctcagtgtccgctggcatacccggtacagtgctccttggagtgcatccctcagaacgatgactgcgtgcttgaagcgctctcgaagatcggatccgtcgtcactgtggcgctcaacgccgccactggaggcgtctttggagagatctacgcgacgtacaagacggccaagtgggctgtcacctgcgccgccaacattgtcacagtagtccgcggtttaatctactacctccgctaccgacagacctcagcgccgcaaggagacacggccgagctactcactgctgcgtatcagacggatgtcgtggtctacgatctacccgtcgcagtgtgcacgtgtctgggtcttccggtcccgaagaacgccaagtttgccgacactgtgcttgttatcgtcgagggtatcgtgaagcaagccaccaccaacggagaggagatcgtctcgactggagagaacgtgctcaagttgctcactggtactggagcactcaacggcacgtcggacacgacggtggacgacctccaggacttgatcagcaagaactcgagctgcggctacgagctcaagcgcctcacccaccacgtcgtgcgtgcagtcaacgacgtccgaaactcgactccagacgcctctgctgatgacgtccgcgtgagcgtctacaagtcttcgatcgtgatgaacgacatccccaccgtgacgaatatgtgcatgggggaactgctagacaacaagacactgacagccgcgttcgagacgcgtgatatgctgcggaagacgttcggcgtgatcgtcgaccagctcattgataccggcacgaccgacatgggcaagaatgtggcgaaagacgactacatgctcaaggtggcgaatatgggtcttgtagtgctatcgacccgacggggatcgcgtacatggcgtcgcagttcgtgcagccgatctgcggcccgactgcgtatctgggcgagatcgacgacgggcgactgtccgatgctctggggttgtcaacagtggacgaagcgttcatcggcagctacggcacgtggaccaagaagggcgacggcgtggttcacctcatctttgatagcgtggatatctacgacgtcaaggtggtcattcattcgggtggagacaaatatgccgaggtgaaggtgggcgcgggggagacggtgacctgggacgccacgatcccggagttgcaggacaagacgctgtacttggatcggtggcggcctggaattctagggctgcctggttctggcggtggttcgttgttgctgtgggtcccgaggtcgtcggagggaggacaccttgagatgcacgtgcgcatcaacccgagctaggtttttcgtagtggcgtggtgtaggaagctagagcttgagtagtaataggtgaattccatggacagttcctgctgtataatggtcaagtttaaccctctgcaccctcggcggggtgcacaaaggagacaacgcgtacgtgctcatctaaaacgaccctatgcagctgaccagatgagtatgagtattgccgtcgactttagagcgttgaagaccgcaaatcgagtgtcacttgcagggtaagcacttggtcgacgtgcttgctcagcaagcctcacaagttgtgaggtgcgtccatcagtctccaatgtggccattcacccgtcattgactacctcgcagccgattccacggaccgacaaaggtacatgtgcaacttgcacagttagcttagtctgcagacgaaagcctttgatccgacccgtgcacatcttgtcgagtccaggcatcagatctcggtaatcgcgctgagcattccaagagcatccccaatcccatgatcaccagattcatgtaagttgtcaatccgacctgctctcgtggtttgagtagctttggcactctcaacgacgatgatcgctatgggtagcacgtgtactgtagcgacttgctttaacaagctcgcaggcctccgggactgcaacttgaagaggtacatttaactgtcatggagagggtcctgcaacgtgcttgtacatgcaccagtcaacgcatgaccagccagctgctcccggcgcagctccacagcaatcaccaaggagcttcataaattggtctacagcttcaccctacgtggcgttgctgtgctgtccgacagcactgcataacgttcatcacgcgtaaatccttggcattctccaaggcatcagcactctactattccagcttgtcgccgaggaagcatgcaccaaaccaacgggtcaagcttctggcgcctcgttcgtagcgagaatctagccggaaggcactaacaccggagtggcacgctgtcatctcggtcagcacgaggtgctaatccccagtcccttatctggtctaggagtgcctttccaccgccgttgcaagaggtctcgctgtctcacatgtcaacaaggcaaccacaacatccgctcggggatcggggcaaccgatttccgcatggactcggtcactcgcgtttttgcaggttctgacacacagccaaaccagcgtctgaatctgaaacagcagacgttgttgccatcatggtggctatggctctacgggcattcgtctgcgtgctgctggtcgccgttcatcgggttgcatcggacaacgccgtacaattcagcgatactttcggaggcccccatgggactgaattctcggacgaagcctcggtagtcgccggagagaccgtgagcttcatcaccattcgtgccggtgctcgcgtggacggcatttcaatgggtgtgtcgtcgcctacagcccagacgttcacgcacggaggaagtggcgggacggacaacacgctcacgctcgcgacgggcgagtacatcacgtcgatggtcgcccattggggcaagaaggacggccacactcggatcttctacctcagcttcggtacaagtgctggcaactcgatctcaggtggaacgcagaccgactcggccggatccacgacggcccccgagggttaccagcttgcagggttctacggtcaagacggcgacgagatcgatctactcggtgcgatctgggcgagcattgatgcgacgacggagagccccgccacggtcgcccctaccaacgattcgtcagcatccgcttccacgtcggtagagcagaattctgtggaccaaacggacctgtcaacgtccgtggagcagaattccgtgacccaaacggacttgccaccagcttcttcaacgggttcatcggctcaaagctcggggatggatgacgggacactcattgtatctgaatctccgagcaccactgctccagcttcagcttcctcgggatctgctactcgcctaagccaaagcttcggtggacctcacggcacggaattctcggacttgtcgctggcgacatcgggccaaacgatcacctctctcacgattcgtgcgggagaccgcgtcgacggcctcactctacaagtgtcagccccgacggcgcagaccttcacccacggcggaactggggggtcggacaacactctcacgctcgagtcaggcgagtacatcacgtccatggaggttcactggggccaaaaggacgggcacacgcgcattttctacttgagtttcggtacgagcgctggcaacatggtttctggaggaactcaaacggatcaaagtggctcggtgagcgcacctgacgggtatcagctgggcgggttcttcggccgtgacgcgaccttcttggtgcgatctggacgagtatcgacgccattacggcaagctctggaagctcagccaccaccacgactgtatcggatagtgacatcgtccttagtgacctgtacggcggtccccacggcgtcgcgttctctgacatcaactccatcaagttccagcaaacggtgagctctattacgatccgctctggtgaccgtgtggatgccgtgacgctgcaggtcaccgcactggtagaggttaccatgaaccacggaggctcaggaggaaccgatgctacgctcacacttggggttggggagtatatcacatccatggaggctcattggggcaagaaggacgaccacacgcgggtgttctacctgaatttcgtcacgaatttcggcaactccatctctggaggaactcagactgatgacaaggccactgctaccgcccctgatgggttccaactcgctgggttctacggtcgcgcggaggatgaagttgatcagcttggtgcgatctggacgaggatcttagccacggacctatcgctgtccgatgaagagacgagctcgagtctaatttacggaactaccatccgaaactgggtgggccccaccatcggcgagtccagcgacacggcgtgctaccggaagtcggtagcttacaacactaccaatatttgtccgctgggatatggcaaagacggtagcgactgtgtggctcaatgcccattgtcgtacccggtctcatgctcattggagtgtatccctcagaacgacgactgcgcgctcgaggtgctctcaaagatcggatccgtcgtcactgtggctctaaacgctgctactgccggcgtctttggagaaatctacgcaacgtacaagaccgccaagtgggctatcacctgtgccgcgaatattatcacagtgatccgcggtctcatctactacctccggtacagacaaacgtcggcgcctgaaggagacacagcggaactgctcgtcgtagcctaccagctcgacgtggtgttgtacgatctccccgtggctgtctgcacttgtctcggcctacccgttcccaagaacgccaagtttgctgatattgtgctgaaggttgtggagggtattgtgaagcaagccatcaccaacggcgacgagatcgtctcgactgctgagaacgtgctgaacctccttacgggtactggggctctgaacacgaccgactcgaccgtcgatgagctccaggacctcatggataccaactcgagctgcggttatgagctcaaacgcttgacggatcacgtcgtccgctcggttaatgagatcagcaacgcaacccccggagtcaatgtggatgatattcgagtaacggtgtaccagtcgtccatcgtgctgaacggcatccctgctgtgaccaactactgcatgggggagcttctggccaacaagacgctcacagcagcgtacgagacgcgcgatatgctgcggacaacgttcggggttatcatcgaccagctcattgagaccggcacgacggatatgggcgaatcggttgcggaagacgagtacatgctcaaggtgtcgaacatggggcttgttgccttgtcgatgattgacccgacgggtatcgcgtacatggcgtcgcagttcgtgcagccgatttgtggaccgacagcatatttgggcgagatcgacgacggcacgctctacgacgctctcggacttacgacggtggacgaggcgttcgaaggaagttacggcacgtggaccaagaagggagacggagttgtccacctcagtttggagagtgtggacaccgaagacgtgacggtggtggtccactcgggaggcgacacgtacgctgaggtgaaagtcggagcgggcgagactgtgacctgggacgccacaatcccggagctgcaggacaagaccatgtacatcgatcgctggcgtccgggccttctgggtctgcctggatccggaggaggttcgctggtgctctggatccctcggtcatcgcagggcggccacatcgacatgcacgtgcgtatcaacgttagttaagttttatgagcttgtgagttggattgaactcggatcaagtcgaaaagaaaaatttaatgtcattggaaatggtgttgaggctgataccttttcagcaaggctgcaactaactcactgtagaggcgacctgttcaatgaactaggtgcactacgtgtatattggtagaccacgatacatgtaacgttagtagtcatcacgataggaagacgccatttcataaccgaggatttcaaagtggaaatcacttgtagaacgcgcaaaataccctaaatcaaatggttttagcacgagcttatgataatgcacggtacggtctaacaaaaaaatactcgcccaaacaaaatccgggatttggtccacgagttctcaacacttcatgcgagcggaacgggggcaccgtgcaccactcccacgaatacaaatctaaacttaccgccgcaaagcggcggcgctgtaaaaacataagcgcaagacgcccctcttgcggttaaatcgcgattcgtagttaggttgattagtaacctggtgttttgacgccggctacttcgttatgtaacctccgcgcggcagatcaaagacagcggatacagtgacacctccctaaatgaacccctctaactgactatgtgttccctatctggttaggattcctcgactgcaaacgggattatatggatttcactataggtgttctataactgatcaaaaacctctttattctctaaatggtcgccattgttggcctcaaccctctaaatggacgccttagtaatagatccaaactcaaatatttttctcaatcacttccctgcctcctcccacgtatgccattgctaccactactcccgccacaacaaatcgagcgaagagagaaattgtatttgggatgctaagttggaacaaagagtttgcactgcaagcttgtaaatactggtaaataagctagccacagtgctttacaatcagcgcagcgtacatatatattttacgaaaagctaaaatattatgatgtcgagacaactaggggctatgcagtagataccaagcaaaagataaaactgcaggcatggtggcaggatatcgagacaataaatattcccataacctcaatgtattgaaactcacgtacaccctgagggggtgcgattctgctaataccaatgagaagaaggagtaggaacagacaataccgcacctaccgttattggttaagttctgtacgaaacaaaacaagagtatgaaaatgctaccaggtagagaaagcccttgtattgtgcacctaacatatgaaaatgtagccattagaagtgtagccatttctttatctgatcaattcgttaactgtattagacgtcaccaaaaaccaccatgtgctgacatccgtcctgggacccccgacaaatataacagccaataggagacaacattcagcaatctcgccagaagcagcaagttgatgccaacaagatcagcgaccgtcactgcggtggaggcactgcgggcccgcaagctcggacggtgcatgaagtaagtgctgcagatcctaatgagatgtatgcggtgacctatgttcttaactattcgatttgcttgtgctgatatggcagcatactctagtggtgatgtgaagccgactactgagcgggacagacttaccacagctagctgtatcaagtggctgcccagagctgctgcggcctctactctgactagtgctgtggctaacaagaacagggggcgaggccttgatcgtgctaggcatcctgcatcactgttgcactagatctacccgcgtcgatatggtttcggcgactcagctggcgcaaagcgcaggcaagctcatggaagccaacgtaccgtagacgattgaggctcacttcgccggcgttctttcagttggagatcgactccaactcgtgctatgtaaaggtacatactcattttcaaatgcgttgtggggtgtgctaattactaagatactaccacttgttgtatattgatgtagacatttagctggtggcaagcggatttattctgcatgaaaagaaactggtaatagactgcattggtgctgattggcggtgcatgcagttcggattggtgctgttgggtccacatccacgctttcgtttgttgcagcttgcgcacgctgggcctgttggccgtgcactgttgagcgtttgactgtgcacaaatgcaggtggtacaggtgctgggtttgaagatacactcccggataccggtgctgctgttggcacgttgttgccttctgctgcctgtagcactgcgcgccgtttacgctctgcattgagtcgacaacgaagtttgttcaaatccaagctcccggacgggtgtatctgctggtattttgcgacgacactcggccactttccgtgagccccttttcgaaaactagccgcgtgctccagcagagcatctagagtggtttcgtccaaaatttcaaaccgacttctttttggtgagtgtggagcttcttggctacttgaattactggggttggtcgctggtaccgacacacacagccatgccaaattgtagctgctgtgtagaagcatctaccggtgcaagaggtttcggtggacgagatactttattgtctgtgaacggatcttgcgcgagtgcctctacggaggcgtttggaggttggatggagttacacgaagaagtgttgagttcgacaccttcatatctgcgacgcttgtagcttacggaccggcgcaaagaatcccagcgtcgctccagaaattcatcactcttctgattaattcccgagcatgtgcaggcggcaaaatcgagagacttgcttggcgtgcttaataccgaccggtaatcgtgacgatgaagtgtctgcttcgctctgtcgtaacgcgcttcgaacatttttaaacttaatcgtgaaggatgagcttgactttttgagtgcgccccatctcctctctagtgatactttgtcaaatgctcgaactccaccgcagacacagctcgcgaagtcatagagtctacaaaacgccagtcgtttctgcgagacaatattggtccgtcgaagagtgtcaaatagttgctgctgcagcgctcgctcggatcctgtttgacaacgacagaatcgcccagcgcttccacaacgaatttccgcacggctgccgctttatcagagatgagatagcagtcgccgtctgcatcgagctgcggtcgaacgtcagagagtagttgcatggtctcatctttgttttcggagctcgtaagacgccgaccaactatctgcccgatttcattttgcaacagaagcaatatttttgcgtctgctagattatcacgttgtccatgaccgctccacagtttcaatcgtttgcagaacttcaccgagtgatcagcacgcaggaccttcttcactttggtctgcttcattactacttcacacagagagccgtataattcagtgtacgccaaccaggcgtcggtcattgagctttgtgacaccaccttgtttttttccaggtatgcatcgacggtgggcgggatcggcggcaaataagcggcattttcgcggtacttctggccgactgcataaactaactttgagagcaactcgtagtacctgttgcgtcgacgtctctccaagtgactcaaagcacgcgagaatccattgggagagagaattccttcatgaacgtgctccattaaccccttagaaaaccccattttcttgctaatgacgaacgggagatgtactgccacgtctgggttagcctcgagaaagctagagctcaacgttaaaaacgtcctggcctttccgcttgcaactttgcgggcgcactggtacttcacatagagaacattatacttgtatccgacgtcctcaataacacgctgcttcctctctttcacgttagactcacattgacatcctggcaccacacagaacggacgcttccatcgtcttcttgcttctggaacccacaccaacaccggccgagaaaaaaacgaagccaagcttgctccacacgatacagattcaggaaagacagtctgaggtgggaacgaacacgtgtctagagcctgttgtaccaatcttcttctctcattgagcgggataacgtcgggatctcgtactaaatcaccgctagcttgctcgcacatcgggcccaattgttgatccgccggatttatctagagtggagcgactcttcgagccgctccgccggagatagccgaaactcgccggagatagcggggcctgccggcccccgctatctccaataaatcctattcctagctggcggcggggccgcccttcgggtggcggcgggtggcgggccgcaaggcccgccaaccctggtcaagccggaggcccattggggcaataaggacgaccacacgcgcatcttttacctaaattttggcacgagcgccggcaactcgatcgcgggagggtccatgacggacgacaagaactcggtgacggcacccgagggctttcagctcggagggtttttcggtcgtgacggtgacgagatcaacctgttgggcgccatttggacgcgtattgctgctgatactccccctccccctacggacccgcctgctccagctcccgctccggccccagctcctgagccggcgccgtcggaagaagtgccggcggttactgaagccccagctccagcgccggcggaggctccggcaccgacagctacggaagctccagcaccggcagcacctgccatctcggtggaggattccgtgcagcttagtgaaagcttcggcggcccccatggtaccgagttctcggatgaatctgctgccacttcaggacagaaagttgcgtccattacgattcgagcgggcgagcgcgtcgacggcgtcgcgctcgaagtaactgagccaaaagctacgacattcagtcacggaggaactggaggaacggagaacaagctgacactcgctgctgacgagtatattacgtccatggaggcccattgggggaagaagaacgaccacacgcgtattttctacttgagtttcggtacgagcgccggcaacacggtgtcgggagggtccattacggatgataagaactctgttacggcccctgaaggtttccagcttggtggattcttcggccgtgacggtgacgagatcgactccctcggtgcggtttggacgagattgaactggtgacagccgcaccaactccggctccggtacccgaggaagctccaggtacagtgaagccggcaggttcaggctcagtggcgtctggaggtacgaccacgaaggtgaagcgagctagtcagttgagcgagtcgtttggtggacctcatggcaaccagttctccgatcaaccggctgctacttcaggacaaacaatcacgtcacttacagtgcgtggcgcggagcgtattgacggtctcactttggaagtgtcggcaccgacggctcagacattcacacacggtggaacgggaggagatccgtacacgctcacgctcggtgaaggggaacatatcacgtcaatggaggctcattggggtcaaaaggacggccatacacgcaccttctatctgaatttcggtaccagtgccggcaattccgtctccgcaggttctcagactgacgagaaggcttcgattactgcgccggaaggttatcagctcggaggattctttgggcgtgacggcgatgagattgacctgcttggtgtcgtgtggacgagcattgaagttgtgggggaacctgcagctgctgctgtatcagcagacgaagatattgtgttaagtgagacgttcggtggtcctcatggaattgcgttctcggatatcaactcgatcaagttcggtcagacagtgagctctattacgatccggtcagccgagcgagttgacgctgtgacgctacaggttgctgcccctgccgaggtgacaatgaaccacggagggaaaggaagtgaagacaagacgctcacgcttggccctggtgagtacattacgtccatggaagctaattggggcaagaagaacgaccacacgagagtattctacgtaagcttcacaaccagtgctggtaacacgatctcgggtgggtcgcccaccgacgataagggcacagtcaccgcccctgaaggctttcaactgagtggattccacggccgcgcggaagacgaagtggatcaacttggagtcatttggacgaggatttcggctaagaacatcgagttgaccgactctgccggcaacggcaacggcacgtcaattcgcaactgggtgggccccactgtcggagcggccagtgagacagcctgctaccggaagacggtggcgttcgacagcaacaacatttgtcccttgggctacggcaaagacgacgacgactgcatcacgcagtgccccatggcttaccccgtttcgtgcgcgttggagtgcatccctcagaacgacgactgtgcactcgatgttctctccaagatcggatctgtcgtggcggtggcgcttaatgccgcaactggaggagtgtttggtgagattctggcggcgtacaagactgccaagtgggctatcacttgcgctgcgaacatcgtctcggtggtgagatccttgatcttctacatgcggtaccagcagacagcggcaccccaaggagacaccgaacagcttctcactgtggcctagtggcctaccaagcggacgtcgtgctgatcgatctgcccgtggctgtgtgcgtgtgcctcaacctcccagtccctaagggagctgtcttcgcggataccgtactcactatcgtcgaaggtatcgtaaagcaggctatcaccaatggagacgaaatcatctcgacgggagcaaacgtcctgaatttactcacaggcagtggagcggtcaactcgtcggctacaactgtggacgaactgcaggagctcatcgacaagaattcctcctgtgggtggcaactcaagagcctcaccgaccgcgtagtgttcgcggtcaatgatgttcggaacaagacgccgaacgctgccgctgacgacgtccgagtgattgtgtacaagtccgccaccgttctcaacgacatcccgaccgtcactaacaactgtatgggcgagttattggccaccaagacgctgacagcctcgttcgagacgcgcgacatgctccggaagacgttcggagtgatcgtggaccagctcatcgagaccggcacgaccgacatgggcaaggatgtggacaacgacgagtatatgctcaaggtggcgaacatggggctcgtcgtgctgtcgacgattgacccgacggggatcgcctacatgggctcgcagttcgtccagcccatctgtgggccgactgcatatcttggcgagattgatgacgggacgctgcacgacgcgctggggcttacgactgtggacgaagcgtttgaggggagtcacgggtcttggaccaaggtgggcgacggggtggtgcacattgtgttcgagagcgttgacaccaaggacgtgacggtggtgatccactcgggaggtgacaagtacgcggaggttgatgttggagcaggagatgtggtgacgtgggacgcaacgatcccggagttgcaagacaaaagaacatgtacctggatcgatggcggcccggaattctgggtcttcctggctctggaggtggttcgttgttgctctggattccgaggtcgtcggagggaggacatatcacgcgatgcatgtgcggattaacgtcagttagagacgacaggttttttgttgtttagcttgaagtcatagagctacatgtatgtggtgtcaagcgtaaagtaaagtctatgagagttgtaaggactgtttgaatagcgatgacggagattctcgttcgttcaccgaaagttgacctgttgactgtgagcaaatcgctctcggtccgaccctcaacgctgacagaagtgttaggccccgactcaaccggcaaatcgaacggtgtggtgctcctttggacggctcgaagataggttacaacagtgccgctcaggaattattgcttttccatctatcctacaggcatggggtaaattgtggtacattgtggttacgagccaaagacatgaggttccttgctggagaagcaaggaacctcatggagaagcaaggtgccgaatggctaccctaaagggatggtgggagggttgaaattcctgagtcgccagcgatggcgcgagacgatagcgcgcgtgagtcgcgcatgatcttgatattgaagcgacgaggatgatagcgtccgaggtctctggcgtagcgagggccggatgccgcacctttctcgtcgtgtcgctgagaccacaattgaaccgacagaatcgttctctgccgtctgaatcgagtcttgtccagcgatttcgggggcctttggatgccatccggactccggaaaaacacatatccataactctggttgctgcgctctctgcgccaggatattaaccaattctcgtaaggacggcactgcaagctttacgcgagttaatttgcagcccagttcgtccgtgtaggagggcaattcagcgcatcgctgtcttcacgacttcaacgcgcgaaacacgcatctcggtaatcgtcctgggggcgcctatctcaatcttttctatcccgatctcatgatcctctccaagttatacatttcctagtgcaatcccatccgaaacttcatcttactgttgcatggcaaggttctccgaggccacgactgacacgatactatcatcgatagatagcgtcggcagcgagggtcgtggccattgttggcatcaatgccgccgtcatcacgctgagaccgagcacgctctcgcctcacttgtcattatcgaaattgcttcccatggcgcttcggatagcgttccgagcgttggctgtgttcgtgcttggggcgtcttcagatgactcagtccagctaagtaaaacctacggcgggccccatggaacgccctcctccgaccaagcctcagtcgctgctggccagaccgtgagctccctcactctccgctctggtgaccgagttgacggcttgaccctcgtcatatccaagccgacgtcaatgactttcacgcacggagggagtggtgggagtgaccaaacgctcgtgctcgctgcgaacgagtacatcacgtcgatggaggttcactggggcgaaaagagcggccacacgcgcgtcttctacctaaaattcctgaccagtgccggcaattcactagctggaggaagtacgacggactccagtgcgaccgtgacagcgcctccagggttccagctcggcgggtttgtcggtcaagacggtgatgaagttgatctactgggcgctatctggacgcgcgttgacgctgcaggccccgggacggtagctccaggtggtgctggctcaggatcaagtagtatgtctgaagatgtgggtcagtcggaggatggccagacacaggaagctccggatgcgtcggtgtccggtagcggagaacagcacgtgaagccgagcaagattgcgggtattgagctcagcgacgtattcggaggccctcacggtggttacgaaccttcaacatcgtcggggcagacagtgaattccaccactgttcgtggcgcggatcgcgtcgatggagtgagcttgacaatctcagcgccgactcctctgagcttcaagcatggaggcaatggcggatcggacaagacgctcgcactagcggaaggggagtatatcacctcaatggaagctcactgggggcagcacaacgcccacacacgcgtgttttacctcaagttcactaccaacaaggggaactccgtctcgaatgggaaacccaccgatgaacagggtgtagtgactgcacctgacgggtatcaactgagtgggttctttggacgaaatcgaccgacttggagcgatctggacgagtattaaggtcgtggaagccacagccacggaggcacccgaagtcgtagacgaagacatccaactcagcgcattgtacggcggtccacatggcaatgccttctcggatatcaatacgctggtgctggagcagacaattggtggtgtcacgattcgctcggacaagcgcgttgatgccgtgtcgctgcatgtaacagaccctgctgaggtctacatggtgcatggaggaacaggaggttccgataaaactctcattctgacagcgggggagtatatcaactccattgaagcccactgggacaagaagaacgaccacacccgcgtgttttacctgaatctggggacaaacatgggcaattcactctcgggagggactcagacggataacaaggcaaccgctactgcccccactggctatcagttaggcgggttctacggtcgtgctggtgatgaagtcgatcagatcggagccatttggacccgaattcgagcaaaaggggtgtcgttgacggacgacatggggtcggatatcacctcgggctctggttctggtttcgttacctacaccacgtcaatccgcaactgggtgggacctaccatcggcacccccacggacaaggcttgctatcggaagaccgaaggcttcgacagccacaacatttgccctctcgggtacggcaagaacagcgaggattgcatcacgtactgccccatggcttatcccgtgacgtgcggggacgaatgcctccctcagggcggcaactgcttgctggatacgctcaagaaaatattttccgtgatcgctgtggcgctcaacgctgcgaccgacggcgtgtttggtgagattctgaccacgtttaaggaggtcgcgctggttatcaactgcgccacgaatatggtcaaggtgatcaaggcgctgttgaagtatctaaccattatcggtgaatccggggcgaatacccacgaagctctgatcgacgcagcctatcagtccaacgcagtggtggtggatctacccgtggcggtgtgtacgtgtctcggtattccagtccccgccggtgcgaaatacgccagtacagtgctcagtatcgtggaaaatgttgtgaaagaagtcgtaacaaacggcgacgagatcacgtcggacgctcagagcttcatgagcttcctcaaacagaacgtgactgccgatacggcggaggccagtgtggataacctgcaagaactgctggactccaacacgacgtgcggctgggagctcaaacgcctcacggatcgtgtcgtctccactgtcagcgacctccgcaatgcaaccaacgctgcagtggatgatattcgagtaactgtgagcaagtcgaatctcgtgctgtacgacatccctagagtgaccaacaactgcatgggcgagctcctgcacaacaagacgcagcaggctgcattcgagacccgcgacttgatccgcaagacgttcggagtcattatcgaccagctcgtggagacgggcaagacagacacgggtaaggacgtctcctccgacgactacatgctgaacatcgccgacatgggactgagtgtactgtcgacgtttgaccccacgggtctcgcgtacatggcgtcccagttcatccagcccacgtgtggacccacgtccttcatcggggagatcgacgacggaacgttatatgaagctctgggactcgtaacccacggcgatgcgttcgaaggcagctacggcacctggacgaaatcgggtgatggcgttgtcaacctcattttcgagagtaccgacacgaaagacgtgacggtagtcgtccattccggcggcgatcagtacgcgaaggtggatgtcgggtcgggagacactgtgtcgtggaactgtaccatccccgagctggaggacaggaccatgtacttggatcgctggcgtcccgggattctgggtttgcctggaactggaggagggtcgttgctgatgtggattccaagatcgaccgaaggaggtcacatcaaaatgcacgtgagaatcaaccccagctaaatttaaaaggatgattttcgagtaaactgcgtcgacaaaatccatgtacctaagtcataacttcattcaaatagagttaatagcgcgagaaatactgaacgccaacgcgtgtcgaacgagctggcgttggcgtaactggtccgggtcaggcatgtaactgcgtgggaactgaagcactcgtagaatgccctccatgtcacacttcatgagctgttcctggagttcgtcgaggatgaccagagacacactgaacatgactcgccagccgtcgatgatgaagatatccagcaggcggatcacgaggttcggcgctagcgtctcgaacgacgagaagaacgtcaggaaccagcgcgtgcagaacgtcgccacgtgcacgccctcggcttggaagtgcgcgtacagctccggcatgtgcgtcgagaacaacagctcgaactttgacaggtacggttggagtacagccatccccggttcatagaggttgcggtcgttctccggctccgagaaccccacgaacaaccagaaaatatccgcttcatcttcagcaacttcggtcagtaagcgcaccaagaatcccatcccttgacagtaccccacgcgcgggttgtacacgacgtacgcgcgcagcacgcgcctaattttcgcttcgagatcggtatttcgggtacttgagctggctacgggctggtgggaggaagatcctccttcacctttgacaacgatgtcgatcatctcgttcaggacggattcaacagtatcctcatcgctgtcggacgttgaggtaaccaatgtggccgtgttattggtgtagatcctccggtggcatgtgcgcacaacgtcaacgtcaatttctcggaaccacactgcgagctgtgcgtcatcatcactcaaagaatcttcctctgcgtccaacccacccgccaactttgtccccactttctccaacaactgatcgtacatgctgcagcgtctgtcggcggacagatagtgcgatgcgatgccgcttgaccgccatggtgtggattcgtaaaatactgagagccacagcgaacttcggatcgattccgataatcctccagatcggatgctcttcttccaaatcggggcgcttccaatcaagtgagaatgcaggcgaaagtttacctagaagcgaatgcattgttaggaacagtttaatttcgagtaacaagaaatcattgacagcacacttaccttcgacagccgagcaagatcttcgacgcggagatatgataggcattcgaagtaaagtgaatcatgctgtaaacccaagtgctcggtcagtacaaagtgaagaacgaagtacaaccctagaagaagcaagtacagtgcgccccctcgacctactttttgaagtaatccagtcagaaggtcctctgtgtccgagctcatagagtctgccgtaagcatggatttgctaggagatttcgcctcccttgcgtcaatttcccacaagcactcctcgatggctagccattcagtcggggattgtggggtgatgaacatgtgatctccactctataatagtgtcagcgacaaaaaatgaattagaaccgcaacgaaaaagtaagggaaccatgcatgacatacctttcgaggggagttcgcggcgctctgattcgcacttccagttgcatcaataggcggtgctgaactctgtcggatgatccttggctggccgcttgggtagttgaatttcccgcgtattgttttccggattgaccagaacatactggcggtcctgcgtggagtaataggctgaaagctcgctgtccttggcgatggagaagttgaccggcgaatcctgcttgacttgtctccattcgcatcctcgacctcttcttcgtcatgtgtcacaattgcgtatgaagccagtgtcagtagcctcgctgggtcgctttgagtgtcaatcgtcggggtcttcacgctgtcttctgctgctttgtgcacttgaggcaccctcccggcctcgaaatcttctaatgtgatgtgcgactcatcgtcttcatcacttcctgaaatcgcttcgactccgtccggcgccgtagacgagctcgatccttcgacttcggtccacccatccgacgtcaagctaaacattttggtcagcttcgaagccgtcgtggatagcgatacactgggtggcgtgagtttcacagccattgggatcttcagtgggtgattagcttccgcaactacttctctttctgctgatgttagacttgataggacggactcgcttgtataacggaagaagatcgacgtttgtaggcgctaaaatgtacacaaagatttaattaccacctccatatccgcagacataacgcaacttaccgttgagctgaataaatccaaggtgcttgcagtagctgactccacggcgtcctctgcatcatccacatataaagttaacacatttttctcgctgtcgatagattttctaccttcaaatccaactcacccactagcggcagcaacttcatctcagcctcctgtagctcttcagccactctgtgcaggtccatctccgtctgcgctcgtttatcatcgtcctccagcctcgacgactgcatcttcagcgttattgcacgcagcatcttgcactccgccgccagtttatcccacacaattatttcttctctcagctggtcatgtcgctctaatctcgcttgaagcggatccagcactgtgaaccgaatggactgctccatcctctcggcttcctcaagctcaacctgcttcatcgtcgccttaaatccccctccgaaagaatgttcctcataaccactacaaaacaattatcgtttttcgtcagatctgtaaaaatataaaacaaaatatgaaaaattcctcaatacctgcaggtctcggagaagatttccgcgactgtagccatcgtagcgcacgcgacctgcaacaccaacacaaaacgtgttaacaccaactttaagccacaccttaaacttccttcctacaaaattctctaaagtcagaacctgaatctgctcgatcatgtgtgtcatctccatctccagtcgtctcaacgctctgtcctgcctattaaagtgccacacggccgcctccaggggcgacgcgctctcccggagctctggctcctcctcgacgggcgcctcctccgccgcgccgccgcctcgaggcgcatagcgaccgattttccgccgcaaaccctgcagcatccgacctgctcccctccactactgtatcggctggtgatttcttcttggtgagcgcgcgcgcggtgtgattggcgatcggattcgcgctcccgcgcccgtgattgcaggaaattccagtgccaacggcaacaggcgaaggcgaaggcgaggctgtcccctatctacgcaggtgcatttttgctcgatcgtagcgttgcaaccttccagcgtaacggctggactggccttttatcttgagcttcagaatacccccgcttctgtcaacagacagttgaagaggtaaaatcaaaaccaaaaaaatatcatggggattttctgccgcaagaagaagcagacaaatgatgaagagaagcatgaaggggacaaggaatcgggcaagatggacgcggagatccccccgccgctcatgatggtgctcaattccgtgcaagaaatggaccggaagccgcccgtgacgatcgcgctcattggtgtgttgtgcaacagttagagaaagacagttgctgtgagaagaagtgtggctaaacgatggattggggtgcagcggtcatgtatttgctgcatgttcaagcgacacggactccgtcgttgttgcgtccgtttgcactgtgagtgcgtgagtgttggtgacgttgatgggaaaatggggttgtcctctactaattccttcttgtcgttagatgtcctggtaaagtggtggcaaacaaggaaattgcagcggtgttcatctcgccgttcatccactgggaggacttgcatctataccaaagcatgtgagtgcagagggtggaagggtgtacctaaggacgacgggctgacgtgttaaccttagattatccttcctttggaaaggatacaaactggaaggacgactcggtagcattggcttttgcgtgctgctggtctacttgatcgtcttgacgcaagcactcattgtggctggggcgcacgtgatatcatgggttggtacacttctcgctcgaattgaaatagttgcagtgaggcatcttacgtggcactttgtttgttgttgctgtagggtgcaatgcaggaatgcattacaggcttttccggtgtgcttaccgctataaaggtatggggcatggcggcgcaaagaggcatccagagtattcatgctgacggaagtaatgttggtcaggtgattttgaatgtcaattcgccagcattcacgaaactttacagcttcaaggtgcccacgaaatacgcagcgtggctcgagttggttatcacctacctattggtcccgaagttgccgatactggctcaagctgccgggctcattgcaggtgcgttacactaatgcgtactctagcaactcgaatgctctactcacggttgtactgccgtctaattacaggttacgtctacgtcgtgactccgaacgcgcaggggatagtcgactgtgtggctcagcaagtgcaacagctcttgattcgagctggaatcatgaaaagacccctgcagtggtggcagctctggccgagattcagagactccatgcgccgacgaaagcagcgccgaaaagaatgaagagaataggccgaacgtggtcttcaaatttcaactccgtactagaaaatttaaccacaaacaccttgaaaggcttcgatggaagttcgtcttcatccgacaggattccacttagataaggtgctggaagctctccggctggatactgtactgcgcagcttcccctccacctctgttgcgctcttccagcatgaaggtcacgacgccgcagttgctcatttttgcctccttagcctcatgctgcaggtcgctggggaagaactcgcggcagaatgctcggaaccagagcgagtggccgtacacgaccaccacgtccttctgctgcttgaagacccagtgcgcgaacgccagcaggcggtcacgaccgctgcccagcaccgccttgttgccgtggctctccgccacattgaacagctcgtcgtggcgcttctccccgcgtagaccttgcaccagcacctcgtgcgggtgagcagagtgcggcgcactgagcgccagcgtgtccaagttgcggccgatctcctgcagacacgacagcacgtggatcctctcgccgggcgtctccagcctcgaggccgacgcgatgcgcgccgtgtcgatggtgcggcgcaggttggacgcgaccacgacgctgccgggcatggggcaacacagatagcgcagcagcgcgctctcctccgactgaggcggggagtggcggtgcggctgcacgcggtgcacgggctccagtggggctgctgctgatgccgcttggttgccgcctgccagcgagcagagcggcgtctcgctcacgtggtcgcgcagactctgcgcctggaagcggccgcgctgactcagcggcgagtccaggaagaccgagtcgcccgagggcagcagcagccactcgcgagccaccgcgcgcaggagactcacgagcgcgcgcaggttgaggccgcggttgaagacgacgttccactcggactcggcgtggcgcacgaacaggacgcgcatgcgcttggtcacgacggcggcatccgaggcggaggaggagaaggaggagggggcgaggaggacgctcgtctcgggggctggcacacctgaggaagaagaggacgacgcatgggaggacagccagtgcttgtcgctggagaagagcaggtgcagcaacgccaggacgaagagctgcagcttccacacgacgtggtcggcggcgtccagcagcgcgggccacacgcccagagacagcaggcgacggcgcgcgccgcggttcatcaggggtcgatcgtcgaagtgatttaggacggtcttcaatgtatggcaagtggcaactgcgcacccttgattagcaacctgcctcaaaaagaaacaaaaaatgtgcctcaacctattttcaaggagattctcaaactttatagccactaagagattctcaggttttatagccacttcaacttcgggaagtcatgcaagccgatctttttctctacgatatattataatacctcaatagtacgccgccagctggcccatcacagtcgaagttgttctctaagcggatagcttagagccagcgtcatttcttgtcagaccatcagttttaagcattcggtactttttaatatgaacttgagtattcaaaatcggctggtactaccggtataaagcagcagaggcggtcggatcgatgtatttaacgagtattcagttttggaataaaacgccgcacgtgtggaccttagcggaccgacttcggaggcggcgcgatgaacgatcagctgcgctgcgcattgcagcccattgatgaacattgtgttcatcatgccatggcccatgccgagcgccacggtggggctcgtggagatcgcgtcgccgcagtatgtggcgcacaccacagagctacgtgctcaagacaatgataacagtatcatgacatgcaaatgcaactccaattattcttgctaggttgtcgtgcaatagcatctcatcgtaccataaccatggtggatgggataggacgccgcatctttcgtcaggcgattaaacattacaaaagcagcacgtctttgttaacgaccgacttgagagtagccaggtcaatatcacctggggcagtcagtattgtactgctcgctaagcactgtacgtgatgccgcccttcacgacggggtaagcccacctgtagatcggcgtggaaatacgtgatcttggtcgtatccagcgaccataagcgccatggtgataaacagctacgcagaagtgaagggctgacgctgtagtcgacaggtgctgtgtgggccgggccagattgaatttcaaccacagtacagtgtagagtagtgcgtaagtaagaatacagcatagaccttcaaggccatgttggttgcagtgacagcgaacctacaccaccgctgctggtttatacgagggctggaccattaagttctgtcgtaacccagatggtccaaccctcgcataaagctgcagatcaagccttgtagcaagatgcaagtttggtttgctgcaaaccgtcgagccgacgcgaaaggactatagcaggggcagcacttgggcattatcaaggcaagtcctagaattattcaaggcaagtcccagagacgctttacttcaatatccctgtgcctagtgtgcgcattcagcagaaacgaattgtcagccaagcacaagcatcggagctcgagtgaagttgcgcctcatggccgaagaggacccgttcgctgagatggacgcgatgctcgcagagcaagtgcgcctacgggccctcccgccgaagcgaacggtccgcggggtgcgcgagttctacctgatgcacaagccgaaggaggacgactacgttggtgtggctctgtgtgtcgctgggatcgaggaccagcccaagctgtatcggtacgacctggtcgacgcgattttcgagggcaaagaggctgggctgaaggcgagaatggccaagatggaccgcgcgatgcgcaacactatcacgttgcaggtgacaatgtggaagcctcgtaagcgtcccctgggcggagtgcgctgcccgcaccgggttggcgaagtcgacgtcattggcaaggtccgcaagctgcagatgtaccattcccttctgcaggggcaagtggaggcagaggattggatggctgagcaggagcgcggcctctaagcggtccgacaagttggaggcggcggcgattgcggtagagtgacgtgctttcatgaaaatgctgaacaagatgccgagcgaactacccacaaccagtgttcagcagtttgcgttggatgataagcatgagcttggttcatgcagggcccaccagaagaaaggtatttagcagatcatcgtggtaggtaagcctaatttaatataacgagttgtcagtgtcaagccatgtattgtccgttttagaagtttgctgggaagtagttgggcacgtcgctcttgtgccgtccaccaccgtgatgctatagtactggtatggctgcggcaggttcctcagcgacatacttcgaccgtgtagcgagttgctcagcagcccctccaagatttggtttcgccgtggatcttgcagctgttgcgttcgttaaagagctgcatccacaataaagtaataagggcatgtactgcatggtatcgggcttgacgtcggcagccaggaccagttaccggtcggaggggaagctcagcagcttctcgcccacgaatatgaacttgagcaactcggagctatagccgacgatgatctttgacaacagtggcttgggttttgggtacgagggcagtgtgggggtgggcgtgtggtcatcttgatagcgggaccgaagcctggggtcatctcgccagcacgcccacgaccatctcgtgtgtcgaggcactaacctcgactaatagtgcaattgtactaacagtgacgcactattagtacaactgcagccactggccaaaatttcattttctcctccaatcaaatttttcagtttcatattttccagtagccaaatcttcagatatttacttctgtagtagcaaagagcagttttctcggagacatccaatggaggaagagactaagtgtgaagatggcgctgggtgcgggctgagtgcgcaggtgcgagcgattcgtagtagccctatgtatgcagtactgcttgcggaacaaagacgaataagaacagaacgagaacaagcttcggatagcaataagcgcagacacaatgacgaagataaccagccgagtcggaaacgtcgtaaagttggtagacagcgggaagcagagtatcaacgccttcaccggcttcgaaaccaagcattaagagatgagactgcgttttatacctccgcggaggtcgatgcaatggatagcactttaaacattaaggtaccaaccgaggtagacctagctagacttcagcgttttgcagttaggatgtttgaggcttcaaccggcaaaaggagcaatttgctgcgtgtgcgagcttttgcatcctatgaatgatgtacaactgacacctttgacggataccattgccgaggtaagatgttctctggttaatttaggtgtcatgcgaaacgtctcttacccttgtgttcgacagagcatgacgcggttattgcggatacccgacaacgcagatataccagagtttatcttgaagcaatacgacgccgcgtcagcactcgatgctcggatgaaggacctcctccttttcccaccaggtaagatacaatggaaacattcagctactactgtgttctcatactcgctctaatgttgtagccattcacagagaaaataactcaacaattatgcaggtttgtcgcgactgcttcgaatatatcaacaataaaagtaatcgcaagcctcctgctttcgccattgcgaatggcaattatgttggttggctaccgcaagagtttccaccactttctcgtaccgatgaacaagccattgcattggtggcaccttgcgtgtccatatcaacaatcactggaggaaattgcaaaacaatacgatcacatcactacatggtgaaaaatacggaagggcacatcgtttccatgctccctcgcgatatctcagagcgcgtgcgcgtgaccattgttggaaatctaacttctgagcaagatgcagcctgtcgaaaacgctatgaattaaatgttgaaaactgccgccaggtagtggcatttctaatggaaaacaacaaggtatatcgagaacataaagatgagtggcaattgaatgcaaacgaaagttgtagaacccgaataatctaaagaacaggtacatcaacattaaacagtgataatgatagtctagccgaagctgtaagagactacgctacatacaacaacgccggatctgccattgccgagggctctgataaatctcttgaaaattgttggataggaacctctagccttatcatgcagccacctactatcacgaatgatgttgttgtcagaaaatccaatgcgtttgtgtcggcagaccgctggaaggcatgtgtgcaaatgtttccgacattatttccgggaggttgtgggggtccgacagaaaagcgcctcaatcctatttcagtggagcgatggatacaacgcctgctacatatcggggatcatcgatttgaaacacactatgcatgtttactcctcgcatttgattatctggcactgcaaagtgcaagacaagcactgcacattaaacttcatgtgtcatctgacgcgttaaaagcaggattgatcccccgtgatgtaattcgtcgctccgtggaaaaccacgcccatgttgttacagcagaagcgcatggaaagaagccaaatccacccccaaaagaggttcaacaggttattaacctacgtagaggtcttcgtaccagtgagacagcattttatggatcgaatttgagcagaatgcgagcacgacacgatcgtttcggatatattaaacgttttggaccactacagctattttttacggtatcacccgataccgctgggacttatacaattgctgaacaatctggtgtactaccgcatcacgtaatcgaagaagccaacatgcgtcttttaccaaaccgtgctgatcggaagcgcattgccaacaacagcccaatgcagtgcgccttattttttgacagaataatgactattataattgatgtttttcttgggtgggatcgaaagacacatcaacccaagaaaggtgggggaattttcggtgtggttcgagcatttggggctgccgcagaaacacaacagggtgatgatctccatgcccacttcgcggtatggttacccggatttcctaccacgtcacagcaaatgaaagaagccatatcttcgaacgaagcattcacacagcgtctaaccgattatgttgattgcatttcaacaacaactatctcagtggttgaatcaccaaatcgttgcttcaatgaggacgctggagaattgaaaccagtcgcggtcagtatcgatggataccggaagccattgccaggacaacatgcaccgattacttcttgttgtcagatttgtaatgtcaagtatagagacaaagatgtgattaatgctgcgattgatattgctgcgcgtcgcaatgcagtaaagttatcacctgaaaacattgattttattagatgctccccaccgcgtaataatgataatagctcattgtcggcactagaattaagcctcatcgtccgcgatgtacaagttcactattggagccacgcaaattcttgctttaagcctacgcgcagaacaccgaaagcatctgtctgccgcttcttcggtcaacccatcacactgcagaacggagagggtacaaattgctctcatctatgtgcgctgacgaacggccgagaagttgcagcaccaatggccgctttatatattcatcgcggtagtccattttggttctcacatgagcatacgtatgtgaacctcgaaaagatgctacaatgtacaaattcaccgacagttgaaattacgatccccgacgatattaactcggattcaaacgggcacgtatcgaatggtaaacgcaagctaagtatgtactggaaacgacaaaaagagttagataacgtcaattttatcactatttgtgaatggtaccacagcggaaagaaacaagacgccgatggggcgctacactttgaaaaaaaatgcacatcggcaacttttcatcatgtcaggaaagcaattgccagatcttagcgctaacacatctgatactgacagaaagttttactatttggtgcttttgacactttttaaaccacatcgagaaggtagaattgttgaagggtatccaaacgctgaacgcgcttacattgggtttaaatccacgtgctcagctcttgaacaaactcaaatgagggaattcgaagagaagtggatagattattacaggtctgaaaaagaagagcaagaatcacaagaagacattctgcttcgcacaaaatctccttcgagagctccatggcagccctacgatcgagaaacagaaatagacaatgacaacttttccgatgcggcaagtggcgacggcgataatagcgacaacgagttagaaacatacatggatcaaataatcagcgaaacattgtacacgtgttctattgatgcagttcagaatttgcgctccacaatcaacaacacatgcgataattactcacaaccagccgaggcttttgtacccgcttacacatcattcgaagactacaccgaacacgtcacttcatacaacagtgacaattacacatcaacaggaactagcgatttcattgcagcttttcctgaggccaagacaagattagaaagactccaggactgcttcgaagcagttccctggaggcctgatcaagccacagccacttcgataagttctatacctgcctttcttagcattgaaacggtctcaaaggcctttagcttcaacttttggcagcacgcgatatttgaaattgcagcgaggcatctcctatttgcatacttgtcagatatcgaagatgctttacaagaaccattatttccagaagattttgtcttgcagccctatgctatcaagaacagcttatagcgtacgtcggaggagaagctggtactggtaaatcacgagtaattctcacactactactatttgccgagaagtggggtcgagaaggaagcgttgaaacccttgcctttacaggagtggcggcaatgaatataaaaggcagaacaatacactccgcacgcaaccttcagctaaacggtacacaatccaactctcctcccagtttgtaaatgaaaaatgtttttcaaaaggtggtattagttataatggacgaaatatctatgacagatcaagggttactaggttccgctggcatgacatcacgagcaatgtccgatcaaccccacaaaataatgggcggaaagcatgccatgtactttggtgactggttacagttaccacctgtacgtggaacaccatgtaagttctaaccagtttcttattagtatcttcgtttgctaattggcaattcatatcattcccatggtcgcaggctttaaacctccacctctagcagcaagcaccgctaggaatgttgggtttaaagtccacaactccatcaactttgtcatctttctcaccgaaaatatgcgtgccaaaatcgacccaatctacgcagaaattttgagtgaacttcgatggggtagactatcagacgctcaccgaaaattattaaactccagagtatttacagacgcgcgacgttcagtgagtaaagctggtcgttctccggattcctattacaatcctgttcttgtcgccactaatgcactacgatgtgcaataaatgacacaatgacaatccaagcatgtacaaagactaacagtacgacatacgaaatctcggcaaacccgacacctcgatcaaaggcaatcttcaacaaaatagttaacgcaaacgacgatgaaactgaccgaattccaatgaaattaatctgcttcattggtatgccagtaatgattacaagaaaacaccccgctctaaaagatgcaaacgttattgctaatggaacaaccggaatcatagtaggtttcgcgcctccactacaagaatctgcatgccgtaataaactagttcatggcactatcgtaaagaggtgcttaaccccccccgacctaattatcattcgcgttcacgactgcgaaagcacattggtagatggatatcctccgggaactatcggaataccagttcttaacgcacagattaagctgtcaaaattcaagaatctatctcgttcatcgatttcagttcgtcaatttgcaatagtgtcagccttctcctgcacagctgaaaacctacaagggaaaacctgcaaggatggcgttacggtaacacccttagaaagaccaggaatgccacatcaaactctctatgttgcactatcacgaacgacatcactgcaaaatctaacacttaccgaagatatcacaccagaatacatgcagcagttccaacctcctcctacgtatgtagccgaaatgctacgactccaagctctcatagatgtgccaccatatattccttctgaagagctcttaaaatgcagtatctggctggagaaaaacaacatacatacagcaacttgaaaaaatagccgaatataaaaaatggacccactcgatcccgatctggaaagcgtaccagcgttgaagtcggcgtctttgctgttgtgaggggccgctacttatctgccatggatgtctgccgcgcgcaggccccaagatttgccataatgatcaccacctgcccccaagcttcggaacatacccaccaagcctccgagtcccaaaagacatccaagaggccttcggggtcagtcacggggtcattttagccgccagcacgttcggggacgacgtccacaacctgccaagcaaccagcggacgggtagcttcagtgcgagcagaacgtggcgagtcgagatgtccacgtttatcatggacgcgatggagacccggtggtccgctgatgttcgctggcgtggcgcatttcatgttggggttattctgccctaattgccagctcataaggcacggcctcatgcatgctgtcagctttccgaccgaaaccacgatgactcctgagcaagctggagaaagttaccgactctcatcgctcatgtaccagtgcatcgggctcagtttgagcgccgacaggtctagcaacatgcagttgtatcggtaaagctagtgttggtccgcatcggaaagttatcgcccacatgcagtaggttgttttctccctgcctaccattcagcaacagcaattgaaatagtgatgctacggtaacaaatccggagtaataatgaatcaccttgtattatcgtgctttgcatccagtatttagtgttcgtatttagtggtaaatcatagaggctttgaatgcaagttgctcaagtcgtgtttcaagccggtttagctccgaaatgacactttctaggagtgccaaaaggatgctaatccgtactggatgtgctagatcatacaggagatggtgtttccgcactacttagtgctgattaaccatccacgacttacagcaattcatacctgagtacgatttatagataagtcgtgctcgataagtcgtacagttacaggccaaactcgcgaagaagtctcgttggatgacattatactgggttgcagcaactcacgcaccatggagtactgtagaccttgacagtttttcttcctgatcgtggggcgagcaaaaaaaaaagatagtaacagaaatagcgataacaatatcagtttcaaagtcagtaactaatagcggttgcaatagcggtggcattgacagtggggcagttgcagtggtagctggcagtgatcgtgacgcaggcgaacaatttcaatagcaatataccgaataagaattattgtgcctttcacttattctgccgtgataattctggcataactctaatccgttatcgaccttaattatgccccgagttagctaatgcccatgttaattccgggtcgtccctccgtggccgaattaggaacggcgatggtgaggccgactcaaggcgggataagctaatccagccttcgttaggcggaaacagagcgattggcggtttcctatccgccaatccatgccattctgctcgtatctccgtcgattagctctcaaatgctgatcgcggatgttaggggaagcgcccacaatcttaggcagaattagcactaaataagcattgatcacccttttatgactctaattccgcctgaattaatagttcacccgccaaaatacgtgaaagacacaatacgtcatattgatactacttacgcagcaatacaagtcacacacattatttgggaaagaggagagtgatttacaagggtctagaggacgataagatcatcgataatgtttggatcgcgtcgttttcaccacggtgggcggcgatactcagatggcatctacttataaatttagtttgagcaagccatgaaatgcctcgtgatattatgcagcaagtcaagcagtatggagtagattttggcagtctttctcaggcatgaaaagaaagcaggagcaatatcattacagtgccattatcaatgctgagatcgtagttgtagcgtaaataacaacggtagcggtagtggcagcagataataaaccgtcgcagtagcgatagcagcagatacgaacaagcaatatcaatgacaacattactatgacatcattaacagtagtgaaatagtagttgtagtagctgtagtacagcgttacaaaactgttcggtgcgtttgcctccgcttagagacccgcacgcgaagcgcgccccagttttattcatgaaaaccagtagccgcattgctggttgggttactcggaaactagccggtggtgggaagtagatcattgctctctgaaaccaatgtcaagagtgcaatctattcacgcacaagtatgtgtctgtttttaagtaagtttttttgttcggcgtctccgtgacgggacgcaatttctactgaaccaccagaccatggcgactagaagagaaggaactgaggatacgttcaatgagttggtggcgctgctgcgacgcaatgaaggcgacgagaaacatgcggcggacgtggaaatggacacgcgttgactgttgatgatggcacgcgacgcctacctgcgagaccaattagttcaagttcaaggagttcggcgggtcacacaaatcgcacaagcggctgcacgcttggtgacacagcgcacaccttctacgagccctggggagagccgggctcctgggctcttgggtgaacccaaaaagtcgcgagctcgggctcctgggctcttgagttcaataagttaagtgaaaggagccctccagaactgtgagccctcgttaagggctccctcacctgtgtgaaatatctcgctgatgattggccgtcattgaagtatctccaggttctaacctgaaaaggcataggaaagagggcttctccttgaggggaaggaaggactatcggcgacgctggggtggcctcggagcggctgtacacatatgagcggcgcgagatcttctagtgtggcgatctttgagcccgatcttctagcgtggcgcatcgattacgcgaagttgctcgccttaagtctaggtaaaattggccaatcagatattactatgaagagcccgtcatagatttgaagctaaatttggggagccctggaggagggctccttgatctcgtacttaccaaaagggagcccattttgtgcgacttttggctctcgttttagggggagcccacttttgaagtagacgggctcgggcttgtagaaggtgtgacacagcgtatctgtgctgggtacggaactcataactcgagggcataattgctgatgttgcctaacactttgtggtaataacaaggattctagggaacctggcacattcggaacgaggtcgactaagtgcaagctcctgtgacaggttagttgcaacaccgtgtcatatctgtgaagttctcctcatgttttttatgtcgtagatggaattgtgtttcgcaccggcatcaatgtccgctctcaatgctgctgcggaatacccacgcgagtggcgacaatgagctgatgagagtcagtgcggcagcattgctagcattttcaacgcagaatcagtgccggtatcccagttctgctaaggttacttgatgtaaagcaagcggacggtgccgccacggatgttgcgctctatgcggcggcaacactttggaatgtatgcaaagctcctgcgttattactgaagccagaggtgcgtgtttaagctttcctgtgaataaccaggagaatcgtgataggtttgcctgtgtctcgcaggacagactatctacgggattttaaaagaccaactgactcgtaagcttagcaatctgctagtcgcgccgctagagccgttccagctctatctaaccccgacaggagagcgcggtatgccggcacttctcgagtttgatggggaaaaccttaatgtgctgatcgcagcttccatatctacacagctcagtgtagtgctgagtattgagaactatactggacgggttcgctctctagcggaccaatttcgtcccaaaacgcccccagcctctgctgtagcaacgagaaatcgcgcgcaagggttgtcttcggcgccacaagtaggcaccagtattgcccattatgacgagagtggaatattggcctcacgaacttgcgcaatctgcgcaaagatcatccgagtgtcacgaagatcgtctagacgacagctttcgctgctgtgttcgcgagatggttgcggtcaaatgttccacctcaaatgcagccgctgggcaagactttcagaagaggctattgctgccattatagcagaatcaggaagactggattcgcatttcttctgcgacctgtgcgttctcaagacaccgctgtgctactgggacttcctcgccgcgcatgctcaacatgagcagcttctgacggaaaacttgttcaaatccgttggaatttctcgagttcccccaacgccagcaacattacctataagcaagcgatcaagttcgagaagtgcagagattgaaacacgtccgcgcgagtcaagtcagcaccaaactgaagagagcacggcaatcaaaggtaccacagcctttgacgaggaagaccggtcaccgtggccctcagtgatgctgttcgaccgcaatgcgaacctcgtgggcgtaggtgacaaatgctatcgaattccagcaagcagccgagatccagagatgtatatttgacggtgaggtatgtcttaacgcgagcttacccagcgacacggcaggagcgcgcaatacccaagaaaacggacggaggtaacaacactgacggacccgttgtgagcaaatgggaggtatcatacgcccgtcagggtgctctcgacatccccttggcaccaggtaacgcgatattctggccagcaccgttcacgcgggatatcctcgcgttggaatactgtggacgagcttgaacacgcattcctgtacgagtttcaaggcgaagaaccgcacgacaagaccttctcaatagggtgtagtctgctaggcaaggcaggcccacttaccgccactgattcgctcttgagttcgattacaacgcagggtttgtggatgaacttgactccgcgcaaaggaatctgcatgaagtcgttggctgctcaacttgggcaactcaagaagcttcaagaagtgcacattcttcatgcgaagaagaaggacaagcccaaaggcccccgcaagctgcgcaaaccacactttcctgggcagcaactcaacaaaattgcagtggatatgacctaagagctaccgataggagaccaaagcaacccagaaaaagctcaagagtcctgtgatcttgatatttaacgtatacagtgctgcatcagttcttgacgagtcaccttgcagctcaacatttcaaagttctgctcgcttacaccttcagggtgatgtccgtgtagatgcgcagcaggtcgtccactggcccagccggcaaactggaggccatgccgtagatggcgctgccaccttccggggatgggttggggtcttgtttcacttcgttcacagcttcctccagtgcactcaggaacttcttcgccttgccaatgtggcgcacagtcacacacaagtgcacagacgtggggtgctgcagggggctgaggctccagccatgcttcgccatcgcgtcgctaaccttgagagcattcacgcccttgtcgccagcaaagctcacgaccatggccttcgggtctcccaaaaggtggataccgtcgatgcgctcgatgccggccttgatctcgtccacagtctccaaaatgcccttcgtcttctcgatgtatccttcgtaccccaaacgcaccattgaagcccacgctgcagcgctcagcgctccaggacggctgcctgcaagagtaggcgtcgcgtagagaccaccggtccagtccgggtacgaaaagtactggaagcgtcggatgtccgcgtacttgtacagcaccacggacgtgcccttggagccgtagccgtacttgtgcgtatcacacgacatactggtgacaccaggtagcgcaaagtcaaacacggggatgtctgagcgcagcttgcgtgcaaagggcagcacgaatcctcccaggcagcagtccacgtgaagtccgacgtcgttctgcaccgcgagcttcgatagcgcctcgatatcgtcaatcataccgtgcgggaagttgggcgcgctgctatacagcatgatcgtattggccgagatgctccagcgcacggcattcagatccaccttgagcgtcttggggtccatcggcaccttgatgagcttgatacccaagatctcgcacgccttgtcgatagccgcatgcgccgtaacgcacgcgatgatctcgggcttggtgatgttgtgtttgtggcggtagtactcgcggtgcgtcttggttgcaaggaagatactctcggtaccgccggaactgagggtgccgcagacctcttcgtggcctccattcatgagtccggcggtcatggcaatcacctcggcctcgaacttgttcaccgccggccacaggtcggcgtgcagcgggttggtcactgcgaacagcgcgtaggccttgttcagcacgtccaggtgctccttctcgccgtggtagacggctccagagactagtccgtccttccacttgtcgtcgctgttgccggccaggtcctccatgaggctcagcagcttctcgtcgtccatgcccttctccggcagcgcgcgcagcttgtccatcttggcggccagcgggtcgttgcccttgagcgagtgctccacctcgctctcgatcttcttcatctcgtccgccatcttggcggacaccacgggcagctgcttgagcgcgtccaccacggcgccgcccaccacgttgagcaggttcttgcgcgacacgaagcgcagccggcgcgcgctctgcgcgatgaaggcgacggcggcgcccgccagcgcgagcagcagcgtgtcgctccagaccgcctcgagcacgggcgcgcgctgctgcgccgccgtccagagctgcagcgccagactcgtgggggcctccgagaaggaggaggcggacagcgccacgcggtagcggtagtaggcgaagagcagcagcagcgacggccagagcttggcgagcaggcggtccacgttcaggagcggccgcagcgacaggtacagcacggccgcggccacggcgtaggccgggagacgctcctccggcacaggaagtagggccgcgtaggacggcggcatgggggtcggagagatggtctccgctgggttacagttcttcttctgaaatgagactttgaagggcgtggtcggatctgtaccgtcaacacgcgtgccgtcaactctgtttttagatcttgtttgggacgggactaatcagaataccagatggcgcgtttagtccgcgaggacgttctagaagggtctgcacttgctacagtagttccatgcatgattgaagtcgttggagttcctgaaaccagcccttccgctgcttgccagttgcctacggctcgttggatgatagtggactcggatgttcagcgggactcatgctcctgtaactcgtgtcgatttgagctctacttgatcctcatggcaagttaagctgtcttcacagagtaactacttataggttggtttgtcaactcgacgcagagagcccatttgccggaactctatacaataatgggagcggactaaacctcccacatctaacaccagattagtctgagcaccgcccgcgctagtgaagcacaccgctgggaatacgactgcgaaggcacgaccaacccgttgagtctgaagcaacacgcatgtgtcagtcagactcatcatcaaacacgatgttgaagctcgtctacatttctgtaattcctaaatttgtagctctttagttttggaatcattacaactgtcgtattttcagacagatgttcggtcccggcgtcgggcgccgcgggcgcggcatggcgcccaacgtcgggcgcaacgggcagggcctcactctgatgctgatgctcgtgcggcaggtccagcagctcgagcgcaagccgcctgtcacgctcggcctcatgggtaccctatcgtactacagaagacacacgaccagttctatattaacataacactccgggcgcattcttcgacagctctcatgtatggtattcacttccagaagaaccagacgccacagctcttcgccccatactcgctgtaagtgaacctcaacatttacaatgagctgaataaaatagtgccagtttaacgctattgctcggttgtgtagctgcccggaccgagtactgagcaattgggactgggagcggatcgttgcgtcgggtcttattcatgtggacgactggcacttgtaccacaacatgttagttcctaccccgcagagatttgcaatgtttttacttaattcgtcgaggtcgctgacgacggtgtctttttgtgttgtgcaggatctcgttcttgtggaaaggatacaatctcgagtacaagttggggagtgtgcggttcctgcttacggtggggtacttgctggtgctctgccatgtccttgtggtggtggtggctcttgttctcgccacggggttccagatgccggtgcgtcgcagttggttgctttcttgttgtgagcagactgaccgagtaaacttttattttgtttttttgtaggcaccactgcatcagtgcagcgttggattctcgggcgtgttgtttgcattaaaggtaaatgtttgatgccgtgaatccgtaggtgttgttgctcgtgtgtaccaacaacctgttcatcgtgttgacttggtaggtgcttttgaaccacaactcacccgcgttcttctcaagtgtatacggctttcaagtgcccacaaaatacacggcgtggctagaattggtggtgatccacttcctggtgccacgaagctctttcatggggcacatgtgcggtattctagcaggtatgtgcacgcaaagaaagtcaagctgagcgtatgatctgactgacaaaatgatacgtaacgtggtcgataggttatatcttcgtggattcaccatcgatgcagtcagctatgacttctggtgctcgcgtggtcagtcgatggatgcgttctctggccgggccaatctccagccgatcggagcatgacacacgatgcgccgcaccagctcattcttcccgtagctcgacgagcatgccagcccaacgctttgaaacggacgagcagctagcccgtcgcctacaagaggaagagtaccaacgagcccaggacatcgcagctccacaacgtgaacaacctttacctgagcgcatcagcccaagcgaacttcgtcgtcggcgtttggctcgattcggcagctaggaagaccaccgaatacattcgcatagccaaaagatgtcagtagtatgttactattgaaatccttcgcttagttgctacaaccggcggtagtttagaggcatcaggactggatgttccagtagcgctccatgaagttgccaattccaggccggatgcgctggtcgtgatccaatacggtgtctgattgtgccgtgatcattatgacgtctgtaaagcagcggaacaattaggtctgagtcgaaatcacatcagtaaaaccgaggaccttcctgggaagcgcttcgacacatgctgaagaccttcaaaagagctgatgacggtcacgaaataaatactctttgcggctatttgtcggtcgtacaccaggtgctgcaacaccccgcaagcttcgtgtccagtagcgcattcaatatccagcaataaaacaacttggtgtggacgaatacttggcagatagatgtgcttggatgtgaggatatcatgccattccacgagtcgccagtggtttggcaacaattccaacaggcgacgctgggctgatctccgagaacgcttgaagcaacagtttgcccctgccttccatggagaccacgcagatatcctccccttacatcatcttcttcacgtggcacacatctccacgtcgattcatcaccactttctcctcgaccggcaactgagcgaatgattctttagccaaaacacgcagcaaacgcgtggctcgctgctggaacgcggccggaccgatgctctcatctcggagtgccgcaaccagatttcgacacgggatcaagtttgcggagacctcgtggacacgcaaacactgggattcttccacactcccccagggatattggtgttgcgggggttttcgcgcttcgtcctgctgttgaaggtggtaattcccagccggatcttgactaggcacggtagtctggtagactatgctttcgtcttcccttgaatcgttatctgccgaatagtcgacgggggatcccattcgtacttcgtacaaactttccgaggcattgcttaaccgtctcgacttggcagttggtcttctggctgatacgacgacgctggcttgggtcgttgacgacgtcgtcggtgttcgttgtgagcgaaggttcatcttgtgcgactttttcgggtgcctagcgcccggctctcggactccgcgggtgtcggttcttgtagagattgcaaatcgcagcacgactgacgccgaactccttcgggagtgaagattgctgctcgccactgccaacccgcgcgataatttctttccggtcaccctcgcagagataccttgaggtgcgtatgcgccgaggtgaggcaacctggatggtaattttctttttcggagcccgtgacgattgtgccgacagaagtggaggaccttcaagtccagtctcctgctgctccagacgcactctattgacccacgagaatagcgccgccctgatttgttcgtcgtcttggtcaactgaaacctcaaccggggccagcttttgcttgtgttgatcccccgcgttaccgcgtggtggcaccatcgtaagtgtcgacaaggtgatgtcgctgactaatgatggtggcgctctgttatttagcgcaaaatgccaggtagaatgagaaatctgaagtgagtggattctgcgatgtactccttccgtttcagtacgcgtgttgccggctccatcgttcctgcaggcgctgttttatcgcgtggtaccgtgtgtgcggtcggcgccttgatgtagcgggcggtgcatgttgtagtgtagccgctttcgacggctctgcaactgcgtaatagcgcgccagcaatgatgacgcgcagtacagacgccttgtgtcgtctgctgaaatatcgattttgtaatcaccctgtggctttcttgcttgtgtagtgttgaaatgtgcaacgaccatcagtgatcagtgcatctacatatacactagagcctatagtgcacaatagtatcattgcactatggctatagcgtacatgtaaaatttgcttccttggatgtcatgttcaatatgcgaagcacagtgcttcagggttgaagtcaccacgtcattaatgacaacctgtgcaggtgtttgaaatgatgcagcacaaactctcatttttgcgcagatgccacatatccttgtctcacgtaaccataccatggtaccagcatggtgtactgtagttgttattaatcctcggcaaatatccaaactactaagacatgctttttttcacgagcgagcaacttatccaagaaatatcaggaaagattttgtagtttggggctaagtgagccttatcaaacctacgtaagcccgcctcggcatcaaaaagcctgcctggcttgagttgtattcaaagtttctttgctgcatagtcttcacccaggccgacccagtaccagcgaaatgaggcgtctcggtgtcttcttgtatacgtaatgcggacacaatacctgcgaaccactgttcgatgatgatgtttaaaaaggccaaaaggcctcaacgttatcgtgctcagttaattaagactgtgagttgcgccaggccacgccgtgagtgtatcggcaacagtgcgcattagacgggttcgttgtaccaatttgacctgagtacatgtagtgaaggcttgtacagaagtagcacatagcaaaaggggagtacgacgctttaacatgttttcccctcgcggcgtggtacagtagcagcaaccaaaccagcctgttagtatccgcttgcgacgtccggaacaccatctcagtatattcgacgttacccctcgccttcgaaaacaccgacttctcaaacaacacgtccgtgttcgccagatcttttgcctggccccttgggtgctgggcgttgagccaagagacgcaatattgtacagcttgccgacgtcgccgtcgttctcctgggatctcggtgccttcactttttttgagtacatctcccgatgagtgtttgtgagtctcccactttgtgtattagagttggtgtctgacatggccttcttgatctttttcgcttcggcgaacaagttgtttccacccgtacatagcgtatcttctaggcgagagaagtgcctatcgagtcacgcagcgtatttgtggtagtcaccgttgagcctcttgtcgttgcatgtggaggctttggctggttcaatattgtatcctcagcgttttagagtacttggggtcttgcacgcattcttgagtttctcggcgctgaaaaggtgttaaccggcccacctctcttcgtcctctttgtccacgctttcgaggctgctcttctgatcgccgacgttgcggctcacatcaaatattcgaggtctggagacgcgatcgtgaacactttcgtggcctggcgtccgcaagcgcagagagcgcgctgctgctcgtgagaagcgtgagcgctgacgctaccgagagggtagttgatagacgcatggtcgatccctggcactgtcgtggctggaaggcgaattgcagaatgagtaagacgcgggaggacggctggtcacgatgcctcgccgtggggctcgagattacgagtaccacgaagtgtgctttggaagcagacgctccacgaaaatgccgcaaaaagcagatacccttggcaagtgcatgaagctgggcgtccgatccgtgacaagccaaaatggacgctagattaataatagtcacattgtctgccaacacgtaataatacttgaagaagccggacacatacactccacgacaaaaagatatggacaccaccaaaagtggctgtaacttcgtcaatttttatcgttttaaggtgcggtttggactagagttgcagaacacgctgataaagatctgcacgttgctaagagcctgttcgcgttgtactagagatggagatggtgcttgatctccacctacagctcgttcgctatgtatccatctccagacaatttttaagccaatcacaggacaaatatgggatggctctcctccccacttgagaaaatgccgactcgcctcaccagtgcggccatgcgtgcggcacatgccgctgctcaaggctcttcggttcctgcgccccccgaccgtcatgacgaaacgccagcgtccgagcccctcgtctcgctgacaccatctgccggtgatgaaggtctgctgctagaaggcgccgagactgcgtccacatttgttccgctagctcaagtatcagtggcgatgtctgctacgccagagcttctagccatgcccattgcagctcccacctcgcgatatccacccgctgagcccaggaaatacagcgccgctgccaccttcttttcgtaggaatgtttcttgaccttagcttgtgcaaaagcgaccccatgctcttgtagaaagctagctatacggaagaaggtggatctcgtacagcgcagattggtctcgaaccagcttgaataggctgatgattgaagcatcgactcgaagcgcagagtggtgacggtaaaacggttcttcttgccagcaggaggtcctggttcgcaactgtctgcatacaaagccacagcctgtgccacggcggagcacgcagcgaggacaattgcatcttcgtctcccatgttgtgcctggccctgtaaatctctaggtagatccgcccctctccacctcaaagagctggagacgaattcacagtgccatctctagttgtcttgttgtgtgctacctacttttgaccaatccggtcacacttttggttttcgtctccatctccagctaccttgcgaacacgctctaagagcctgttcgcacgctctaagagcctgttcgcaacgtagctggagatggagatggcctctcatcaactctatttcttgtcttttgattggtcaaaatagtttagttcacaacgtgaccactggagaattaccccgtctccttctccagctctgggagctggagaaggagaaagtagctggagattgaggcagttcagccgcacacacaatgaacgaagaggaagctgtactggttgctacatgctcagctgtcgcacaggttgcagtcctcctatcaggagaatacgacgatgcgccgcaaggccctaaggaacagattcgtaccgtgacctcactgcactttgagcccatgctacagtcagccgcgtatgcaagttggtttgaagacaatcttcgctgcaccaagccatctttcctacgtattgctggtttactacgagatcaaggtgttctgtttgctgctgccaaagtacggcagcatagctttgagaagaaagttgcagccgtgtcaaaacgagcccgcagcagggcatcagctgctgcagtcgtccacgcaaaggagggttgcttcgtagcgatagacgtttcaccagtattggccttcttcttctgattcccaacgcggcgatgtgagtcttggttgcgggctgacgcagctacaactccgagcgcaaaaagctggctgggtgtctctgaatgcggcagcgccagcgaggaagtgcgggcatccggtgtcgcatacacagtctgggcaagagcaacatcagaggcaggtatgtccaaactgacagcagccagcacgaggtcgccactggctgacgggaacggaggcgcagctctcggagcgtcatcggcagcttggtccatcttgccacgcgtccggtgtctcgggcacagtgttcccggccgacgaagaacagcaaagtaaggagaaggagagcgagtcgcactgtgattggctaattttacctagatgcgctctgttgtagtgaacgagctggagatggagatgcacgaactccctgcagatatccatctccagccgcgtagcgaacatgctctaacacgcgcgcttttgcgcttcttcaggtagctcacatacaaatcactggttctgcccaggtgacaaaacttatggacagctaatccccatacaaaatcctatattaaccaaacccccttacaaatgatacgacttggactttgtatggggcgacaaaggaacccatgatttctccactctaccttagtactgagccatatatcatcgaccaacagtttagaatggagaagacaatcgtatatccaagagatagcagcatacagagctacgattggcactaactaggatgcaactgaacgtgcctcgcaaataatcagataatacatggtagccaccactcgaaatttcagtcgcttactacttgctcagttttgtgcgatggtcgatgtatttattacaggttactaaacacaccttctagtacacgataatgccatcagatctttgtctaacgtcgcgagtatcgccgtgaggctggttcctttgtcgccccatacaaagtccaagtcgtatcatttgtaaggggttttggttaatataggattttgtatggggattagctgtccataagttttgtcacctgggcagaaccagtgatttgtatgtgagctacctgaagaagcgcaaaagcgcgcgtgttagcaacgtgcagatctttatcagcgtgttctgcaactctagtccaaaccgcaccttaaaacgataaaaattgacgaagttacagccatttttggtggtgtccatatctttttgtcgtggagtgtacctaccgtagcatgggctttgcgtgccagtggaaatttaccaccccttgctgccacaacgaaactacagtaatgtgcgtgaataccggacgggtctacagctaatacccttgtataatttataattatgggcttacgatgtgacgagatggtgatgagcaaaggtactgagcaaaggtactgagctaaaaatccattaatctcgtgatgtcgtattcagcggtaatttgaatattggcgcgctttcgccactttgatttcctttaaaagcgttcacttcctcatttgcgatcaaagcctcaaactatcaaccaaggtatcatccactgtatcaagaggtatgtattatcagagaaaatgttgtatgcgctcgaccaaataggagaaggagtagatgagccttgtaaggttgacattcttaccgctttgatgtggtgtgaggacgcctgatcgaaggttactgctgataccatacagcattgctggtatcactcgggccttattaacaaggccgccatcaatttctagacgaactaaatcatatcaatacattcctttttcttaaccaatcggattcaacttatactcttggagacctcatatatatcagtcgtccggtattcacacacattactgtacacctttgtgcggcctacttcgtaccaacgtgcaatcaaatccgaaagtcgcaaaattcatattgcaaatttctagttagcaacttcaatgacgcattcaaagatggaattacggcaatcaaattcgtacagtaggctactactacagtactggtccgacgagccctgttacatgccgtacaccatgtcctcgttgttcgccgccttggtgacgaagtcgcgacagtacagctccatgctggccaccagcgctggggacatcacgttcatgttagcggtcgcggcgcgctccaggatgtgcatctggcgttccgaaacaggagaggatctcaccgttgctgtctggctccagggcagccgaaaaataatttgacgctcaagtaattgccataaatattattgcataatttatgagcggcggcttagaccgtaccattatttatgataccatattactattccacactcataatttatgatactatctcacgaacggtgcggaagacggcggcgaggatccagagggttcgtttgtccagcgtctcgagaagcgtcaacggctcgaggctcgaaagctccgctacgacctcatctccagcatcccgccgacctcgaacaaggtcgagcggtttttcagcgtggcgcgtaccaggtttgctcaagaacgcaacagtctccagcccgctacgctggaaacaactttgtttctgcgcaagaatgctgacttctgggacgtttcgagagtcgatcgcgtcaattagtgcgaggaacagtacgtctaatacccgttgaagttgcaccacattatttatttattgctcgaatacattacataatttatgcagatacaaatgacaagatccttgcgatttttatgagactctatctgcgctaataaataaaaataccatatccggcagccctgtctggctcacgcgagcgatcgtagattgcgtggtgacccagagccaagtctcgcttaatgcgggattttaggacgctgcttctcgaggacggtgtggcgagtaacgcggccttagagggacatctgcaaagaagaagaaggcaaattgagaagtgagctcccctcggtcagcgtcggctatagtgcgcgccaaaccgcgcgcccttgcttttggcgcgagcacagcacgccagcttacgtagccatggagatcttggacctctggtccaactttgattgccgtaattccatctttgaatgcgtaattgaagttgctaactaaaaaaattgcaatatgaattttgcgactttcgggtttgattgcacgttggtacgaaataggccgcacaaaggtgtagaaagtgatcgcttgccgatgaatggacggcaaaacgctgcacttgcgaaggaatggccaagcttgagagtaatcagagtagtctgactcgtgcgtacatgtacagtgcgaacagagtgatccagtttgtctgccctgagtcaggccccctgagtcatgcgacgctatctcaactgtacgatgaagcaatgcaacagtacagtatgattcacctggatggtaggtactgtagccctggatttctattcgtgtgacgctgcatacttagtcatctgcttagcttattaggagctcatagtgtaacaaaacgtctcgggaaaacgaattaaaattaagatactcgaatgagcaatagagtttttgtttgcttatatgttgcctcgaaatccgaattcgataatcaggcatttctctggggaacacctctctatcccagctgcgtgaagtggctattaatagtacccaagcaatctacttagacagactggtaaagtactgacctgccccatgtgtgtttcgtgaagagaaatagctactccggacaacactagtgtccatagagcttttcactgactatcggaaaggatttctagagaataggattttatctatttaaatctactaggggcacaccaccaaatctatctagggcaccaccaccaccaccttgtatgatgtcggcaacttcttccaaggccgatcaggacttgctcttggtttgcaacccgaagttgaagtcgttataaagtttgagaatctccttgaaaataggttgaggcacattttttgtttctttttgaggcaggttgctaatcaagggtgcgcagttgccacttgccatacattgaagaccgtcctaaatcacttcgacgatcgacccctgatgaaccgcggcgcgcgccgtcgcctgctgtctctgggcgtgtggcccgcgctgctggacgccgccgaccacgtcgtgtggaagctgcagctcttcgttctggcgttgctgcacctgctcttctccagcgacaagcactggctgtcctcccatgcgtcgtcctcttcttcctcaggtgtgccagcccccgagacgagcgtcctcctcgccccctcctccttctcctcctccgcctcggatgccgccgtcgtgaccaagcgcatgcgcgtcctgttcgtgcgccacgccgagtccgagtggaacgtcgtcttcaaccgcggcctcaacctgcgcgcgctcgtgagtctcctgcgcgcggtggctcgcgagtggctgctgctgccctcgggcgactcggtcttcctggactcgccgctgagtcagcgcggccgcttccaggcgcagagtctgcgcgaccacgtgagcgagacgccgctctgctcgctggcaggcggcaaccaagcggcatcagcagcagccccactggagcccgtgcaccgcgtgcagccgcaccgccactccccgcctcagtcggaggagagcgcgctgctgcgctatctgtgttgccccatgcccggcagcgtcgtggtcgcgtccaacctgcgccgcaccatcgacacggcgcgcatcgcgtcggcctcgaggctggagacgcccggcgagaggatccacgtgctgtcgtgtctgcaggagatcggccgcaacttggacacgctggcgctcagtgcgccgcactctgctcacccgcacgaggtgctggtgcaaggtctacgcggggagaagcgccacgacgagctgttcaatgtggcggagagccacggcaacaaggcggtgctgggcagcggtcgtgaccgcctgctggcgttcgcgcactgggtcttcaagcagcagaaggacgtggtggtcgtgtacggccactcgctctggttccgagcattctgccgcgagttcttccccagcgacctgcagcatgaggctaaggaggcaaaaatgagcaactgcggcgtcgtgaccttcatgctggaagagcgcaacagaggtggaggggaagctgcgcagtacagtatccagccggagagcttccagcaccttatctaagtggaatcctgtcggatgaagacgaacttccatcgaagcctttcaaggtgtttgtggttaaattttctagtacggagttgaaatttgaagaccacgttcggcctattctcttcattcttttcggcgctgctttcgtcggcgcatggagtctctgaatctcggccagagctgccaccactgcaggggtcttttcatgattccagctcgaatcaagagctgttgcacttgctgagccacacagtcgactatcccctgcgcgttcggagtcacgacgtagacgtaacctgtaattagacggcagtacaaccgtgagtagagcattcgagttgctagagtacgcattagtgtaacgcacctgcaatgagcccggcagcttgagccagtatcggcaacttcgggaccaataggtaggtgataaccaactcgagccacgctgcgtatttcgtgggcaccttgaagctgtaaagtttcgtgaatgctggcgaattgacattcaaaatcacctgaccaacattacttccgtcagcatgaatactctggatgcctctttgcgccgccatgccccatacctttatagcggtaagcacaccggaaaagcctgtaatgcattcctgcattgcaccctacagcaacaacaaacaaagtgccacgtaagatgcctcactgcaactatttcaattcgagcgagaagtgtaccaacccatgatatcacgtgcgccccagccacaatgagtgcttgcgtcaagacgatcaagtagaccagcagcacgcaaaagccaatgctaccgagtcgtccttccagtttgtatcctttccaaaggaaggataatctaaggttaacacgtcagcccgtcgtccttaggtacacccttccaccctctgcactcacatgctttggtatagatgcaagtcctcccagtggatgaacggcgagatgaacaccgctgcaatttccttgtttgccaccactttaccaggacatctaacgacaagaaggaattagtagaggacaaccccattttcccatcaacgtcaccaacactcacgcactcacagtgcaaacggacgcaacaacgacggagtccgtgtcgcttgaacatgcagcaaatacatgaccgctgcaccccaatccatcgtttagccacacttcttctcacagcaactgtctttctctaactgttgcacaacacaccaatgagcgcgatcgtcacgggcggcttccggtccatatcttgcacggaattgagcaccatcatgagcggcggggggatcctttttgctgaccacaaattgggttccaatgaggaattattatgagtcactttgtgtccacaaagctcacaagcgataagtcaaaaccgccgtacgtatacatgtcaccccagcgcgagctgctaacccaatgtaagcggtcgaagtgatgctccgatttcatgcactttgtatctgcccaagactcgatgagtgaatcaagtgaatacgggctgcatgtttgtcagtcatcttcgtgagctgagttccacattttattaatcagagtcaacgaaatcgtcaactcccgtcaacgtgtacttctctggcccacataagaaacaacacatcggttttcaggaaataactttttacaaaaaaatcgtttggtgactcgcaatacctcaaccgaaagctgcgcatttgccccgtttcacgctatgatttaaaaaaatctagcagcagaaagaaaagagaaacaccttttatctgaagtccgttttaggaaacattaggttttttagcgaggtgccgtcaaaaattagcgatattagaaaataaaatatcaccgtaatcgcgagtgactgcttttcccttatgttcggttgtcgatgttgttgcgcctgttggaaacgagttagaagggctacagttttgaggtttttctacgcgattatctcgacatgcgcagacccatttattttggccaatagtaagaggaaacagttgattatacccaatcatatgtgacatgtggttcacatcaaattgaggtttaatgctgaatgctgtttcttaagtgggccagagaagcacatacaaaagaccccagtgtttggccaccatgcaactatcttccacccccacgctcgttgactaaagtggcggtgccttgtagcatgataacttcgaacaacaggttacactttgtatccaacatacatgatatgtatgagacggtttcaaacgaaatgatgcttaggcgccatttggagttatcgagataatcgcgtttgaagttgaccaatcaattttcggaaataaccggacatcaaaatttcgaaagtgaaaagcacacgtaaaaagcgtaaaatcactctgattcgctttcttttagctctagatttccaataatatacaatacgttaaaattgaaaaaatattgaggtcacacgccccaaatacaatcgtgaatttaggggtccgaaaatggagataatttttctagatcgatgtcactccgggatttcttaacgtttcaaagcattcgatagcttaaacgaagcacaagacacgcctctttcgattgatgcagttaaatcgcgattcgtacttatgttcgtaagcatcttttcgtttgaaaccgtctcatatcaaatacggatcttgttgcaggaactctttcccgtcgcgcagttcggaaaataaggaactcagagactctcgtgcacttgctgctggtactgtagcagcgcattgtgacaaatttctcgtcgtggtaacaagctgttgccggcattatttgtaaaagagtgaccaacgacgccgcgaaagttgtttatggtgttgccacgcgatgcattgcagttttggtgaccttgacaactgccggccagtacagtacactgagacctagacatgcaagcaaaaggagttgatggaagagccgcgtccagtatggttacggagcgaatggatgcacgaacgagaagataggcaagatgagaggccagcgaaagcaaggtaatcatcaagtgcaattttcgagacatgccacaacctgaagcataaagcaaaggaggcagaggtgtgccagggtcgtcagctcgcagtgcaatgcaagcggcgctcttgtgttgccaacacagtgtcggtctcatcgagtgatgaaaaggaagctcgaggattgttgttgctgctggatgaaatgaaacgacacgccgctcgtgaagtacatgtacatggaccgcgattgcaaaagaagcagcaactacgactggacattggggagatcagcagactttgtgtgtttgtcgaccacccgtgccgtattcaattgacgatcacacctggaccgaaagaagacaagtgaaccttgcaaggcaccgccaattgggtcgctttcgatagcgtgctgtactcaactccgtaaaaccattgatcagtacacaccatatggtatctttcgtaaaatttcctaaaaatgcaagcgtaggtgcgccaccccgggaagtccgacgttggcatgtccccttttttcgggatgtgcatgctgcaatgagaggtcgtgcatgcattttggtcgagactgggccccaattttggcgcgttccccagcctaaagatcagaattcggcctgtcggtgctttcgcttcggccgtggacgccgtcactccagctggtggtcgggaacaactgacaaggaaagcgggccttctggtcgtgagcaaagggagtcggtcggtccgaatctgaaaagttacctcgaaacctagcagaccccatcctgaatcggatcctggccaaagcccagcttgctatcccatcattacgtcgcgggctctttgccgttcgtatgtagcgcagcaaaacatgaaaacttggcaaatgtatcaatatctagccggccagcatgagatttgccgccccattcggcatttttccgccttcgacgcaagccagtttggtacttcccaagagtctggtgcctgaatctgagaccgaaaagtgcaaaccaacatggtgctccgcgcggtcaaggtactcatccaggcagcgctgctcgtgcaggtgctccaggttacgggctcggttaacggcctccaggtgaacgagaacttccagaacaccccgctgtcggcgaacgacgcccccggtaccgtcaaggcggccaacatccccacgtccttgaacaagaacgcggaggagggcgaggagcgcggattctggagctggatcacaggtaacgatgacgacaagtccaaggccggctcgacgacttccgacacccctgcatcaaactcggacgggtccttggcgaccactaccccaatcccgggtactgcctacgtgagaccgtcttacagcagcatgatgtccaagttcggtagtctcaaggatgactttgagaggagcgccggcataacctcgtcggcgtcggcgggtgccgacagttcgactggtgccggtgacgacgaagactctggcagcgcagcccccgctcctaagactaaaaagaccaagaagcctgtggcggcagccgctccttccagcgactcggcggctgcttccgaaagcgcttccggcagtgaggcaccggcacccaagcccaagcggaagaccaagaagccacctgctacagtcaccagcagctccgaaagtgcttcggcttctggtagcgagaccgctacgcccaagcctaagaggaccactaagaagaccaagaagccggttgttgccgccgacagcgagtctgagagtgcctcgaaggccgcttcaggtagcgaccttgacgaccttcttggcagcgacgtgtccggcagctccctggacgacctgcttaacgacagcgcgtccggtgaatcacttaacgacctgctcggcagcaatgccggctccggcagcgaagacctgtccgccctactggacatgtcgggctcgggtggtctggacctcgctctcggctctggcagcttcacctatcaagatttcttggaaatgttcggttccggcagcagcggcatcgaactgttcggcgacccgacccagccccagaacaaaacgattgaggacaaggacatcgtcctgggtaagctgtacggtggcaaggagcacggtaccgccttctcggacattaagaacatcaggtttcagcagatgattctcaacttcacgatgcgcggtgacgagcgtctggaccaggtcggtatcttggtctactcgcaggacgctgtcggcaacctggtgcacggtggcaagggcggcaccgagaagttcttgagctgggaaatgggcgacacggtcaccaagctcgagatccactgggacaagaacaagggcaagacgtgcatcttctacctggccatcaccacggcctccaagaagaagctctctgtcggtaccaagacggccaacagcatcgtcctgacgcctcctaagggctaccagttcgccggttttcacggccggtacagcagtagtgccatcttctgccttggtccgatctggactaggattgcagcctcggatctctatgtcaccgatgtggtggctcttcctgccgacgcttccgaggacgtgtacaactacgagaccacgatccgcaactgggtcggtccccttgataccgcttccgacaacgcctgctaccaaaagaagttcgacacgagcagcaagggcttgtgtccctcgggatacaacaaggacgacgacaagtgtgtcactcagtgtccgcttaactaccccatcgactgtctgaatgagtgtatccctcagaatgccgactgcacgcaggaaattgtgggtaaggtcgctgccgtagccgctgtggcgcttaacgctcttacactgggtgtcttcggttcgctcgtggctgcctacaggaccgccaacttggtccttacgtgcgctatcaacgtcgtgaacgccgtcaagtcgatcgtgtactacctgcgctacaagcagaccacgatcccggtcaccgacacgcagaagctcctagacaaggccttccagctgcagatcgtcatcctcgacctgccgctcgccatctcgtcgtgcctcggcctgcagatcccgcaaaagctcatgttctcagccaccattctggctattgtgtcggccatcgtcatgatggccgtcatggtcggcgagaccctgttcgcgtcgtccgacaacgtcttgctcatgctgcgtgagtcgggtgcgatgaattcgacggctctggacggcaatacgtaccaactggacgacttcctgaacaccaagaacggcacgtgcggctacgagatcaagacgctgacgaaccgcgtcattggcaaggtctacgacatccgcaacaccacgccgaacgccgccgccaacgatgtgcgcgtggaggtgagccagtcgtccatcatcaagacggacatcccggtggtcaccaaccactgcatgggccagatctggaccaacaagacgggcgcgtcgtcctacaccacgcgcaacatgctgcgcaagcagctgagcgtcatcgttgagcagctcatcgaggacggcacgaccgacatgggcaagcacgttgccaagaaggagaaggccctcgagtacgccaactttggtctgttcttcctgtccatgctcgactttacgggtattgcctggatggcgtctgagttcatccagcccatctgtggccccagcgagtacatcggcgaaatcgacgatggcactctgtacgacgctctgggtttgaccacggtggaccaggctttcctgggcagctacggtatctggaagaagaagggtgacggctcggtcaccatcatctttgagagcgtggacaacgaggacgtggacgttgcgatcaagtcgggcggtgacaagctcgcgtcggtcaaggtcaaggccaacaccagggtcaagtggacgtccacggtcaaggagctcggcgacaagacgctgtacctggaccgctggcgtccgggtctcttcggcctgcccggttcgggaggtggttcactgctgatgtggatcccgcagtcgtccgagggcggtaagctcgttctgcacgctcgtctgaatgttagctaagcggaaatcatgtcatttagcgtcgtgaacattgctcagaagctatgggcagtgaattcacaagttaaacaaaatgcatcaaagtttattgtggaaaccgattatattgtccgagcggattagctgataaagcagcgttcatgagggatttgactagtagtaaatcgaggattcctatgatttcatatggcatcggtaagggtataaatcggtgtaaggttaataaaatggggattgcctcattaccgcctgcaatgagaggaacaaccacttaccgccacgagctaatgtttcgcgcacctactaacgaggaatagcatcgcgtgcattaaatacgcttctgtgagcagtcgatatgtactgtactgctatctatttattaagttgtgaagtcatgtatttgcgctgtcatttctcgtcagcattagcgtttgtcagttttacttaaaataggccgccgaatgccgagtgggtgtcggacattcgggctgattagcatgcaaatcagccgtccaaggcttggtaagtcgtggagtagctaaatcagcttgccacatggcgatgtaggcacaacagactgctctgtcaaatcagagtacaaatcttagtctgtcgatctaattaggaggtcggatttgctaaatccgactcgattaagcttaatcatctgcttaatcaaccgatttatactccaattagacaatataatcggtttccacaatatctgtttctgtgttcaaaactcgagtcaattctcagacaggtttagctggaaatagtgtgaatctccctcactgagtgacgagttatggtgcgcgcggaagaagaggatgagaccatgcgtccgtgcggatgccacgccggccggccgtgcacgtgcgagatggggaggcaggcggaatctaccaaagttttcgtgtgtggagtttgtgtcaattgtcgccttaacgcacgcgaaggaactcgagccagaaggagatccacttccggcccacggcgttgtctgaagagtgccgagtactttgctgagttggcgtttgatcgggtgtttctgcgaggaaactgcgtttttcggatgcggaagcccgactggaagtaagtagtctacttgactgtgggattacgcttaggatttgactgggaaagtttgactgtgacgcgcagtgtggacgagaagaccccgatgtacaacaagttgcatcagatgcgactcgctatgatccaaactcgcgcagtcttgatggcaacgattgagactcaaaagaagttgcgcaccaaatattcccaagacttgataaaggcacaagaagcgatcaagaagctggaagagatgaagtaagttctctctggttgatatgcttttgcgcgtagaattctaacatcgtgctggtattcttttcaagagttgaagcggctgcaaacatgagaagaatgacgaaggagcagccacgcgtggactcggatgtttttgattcgttctctaaacaattggtcgacgctgaaacgcttgtaccagatctgaaagcaagactagagaaagcgactgctaccattgccacggagcagagcaacatcaaggtaaaacaggcacgcagcagctaaccgagaacagcaataggtactaacgtacatatttgattcagaccattcgcgagtacgtccgagattttgcggcacggaaacttcaggccacaatcagagcgtttttccgctttcgcaggtggaaaatcgtcctgagcgcgttccatgaagacgtctcgctgtctgcagcgctagagattcaagctacgtggcgcatgttcgtcgccaagaagaagcgagagtttctcttacagctacggcgtgacgaagtgaagatcgatgcagcaaacgtgatccgacgcttctccctcaaggtgatcgaagctaaacgtcggaggaaattgacgtcgaataaagaggcagaggcagtcatcgcagcgcggaaaagaaaatctctcgatgcgttgttcgacatctacagtagatttgtgcttcatgacgcgctaaaaacctggaaattagggactcatgaagcaaaacttcgcgcgctaaggagaacgctggctagtgccatcttgatccagcggatctaccgtggattccgtgaccggatctacttgaagcggattaagataaggaggtcgttaacagaccgggtcggggctcttgtcgaccaattcatcgtttctgggaacttctgggggtttatcctggagatcgacgctgattatcggcgcttcatgcacaagatcgatgaagaagaggccgacgcgacgacgttcatgtcgacggtgcttcggcagcgcaaacttgatgaggatcaaatgatgcaggtactatctcttggtgttgcaatgattgtctttgtagtgatctaatgggtggggtatgcacaggactggttcactgcttcagcattagaaagtcccattgtcagcggtgttggccaggttaccaaagcttacagtagtgaagaagacaactcgagtgggagttcagtgtcccaggccatgttgcagtcagctctcgttgaagatctcgtggcgctgagccccaacaagaggaaagatgaagtgtttcccgcggatttcccacctaaagttattcgacaagctatggcaaaggggttttcgctggacgacaccatcgcagtcatgtaggtccttctactgttgttttctgtccatttcttactggaaaatttgacgttatatggaatccaggcgcggtctacaagctcagggaaagaacatcgaggatgccgacttggttctatcagcacttcacaatcgtgcccctctaatgacgaatccatggacatcggaaagaattttgcgtggatcccgcgaccccaacaaggccttgattactactgtatctacctcgaaaaaggatagtaagatctcaaccaagaagccggcggctaagcgaagaacggatgcgtttatctcggcgaatttgttggagagtatcccaggagggatgaatgcgccaattgctcgattgctgctcgttgccgcgctaaggtgctacgacccagggagtcgaggtgaaaaagggggatttgtggcgtgcgattaccgcaacgcggacattttccagtcatatttgcgcaccgagtctccactcgttaaggtactgtccattctattagcgaaatggcggtgtcctcacgatgttcctctcgttttgcttccgtttttgcagattcgaagcgagcagcaggctatggaagctgtaaagcccttcctccacactttgctcgagaatcggtgctacaccgcgtacgatattttgtacaatgtgcgaggcataggcgaactggtgtcatggaatctccccggtcctttggcaaggagcatttacagcgttattcaagagattcacgagcagagcactcgtgtgagcaagcgcaacattgtgagagaagcgcgggttagtgccgactttgagcattttctcaaaaatcgagtagtagtcgaacgggatcaagcacctgctgctgaagtcacgcccgttgaagaattctccgagccagtggcagagcatacagtaagccaagtgagatctaggctcgagacggaggtgctggggcttccgcttcaagatttgtcactgtcggcgtccgagttactattcaaggcagcattcgtggttgacgggggcaccggtaccgataatcccaccacaccagacacgtatcaaagatttctccactctctcctggctcttcaagctgctggaaacatagaaactatgaagcagctcatagcagccagagttgcccaagcaaaggcgattgcagacgaacacttcgacattttcaagctgtttggggtcgcgattgccagcgatctactggtacgatgataaacaatccttaccacagagttttaccacattctcatagttaattttgctgtctgggacagaaagacaacctcgttgaagtgctgatacgagatcaagctctccagcaaaaggtgaccgagttattagaaccgttcgcagcagttgacttgaatacgccactggagctggaacttcccagtgtaccgagtcgtataatcaaatcagccaaacacgccagtttgtctcctttgatcaagcgcggaaaaactgtgatcaattctttggacaaggctgaggggctgtccggcttcagttgcaaagctccaacgtcgacccgagagaggcctccaagatcattaaatgcgtgaagtcgttgtcaaccgaatgttgctcgccttcaccactgtgaccagaaatcgtttcttcgatctttacttggagtcttttgctggtacgcatcaacacttcccagatcgtggaatcagccgacttggtacgaacaccagtctcgttatcctggggtacgaaagagtatgtaagttgcctatcgcgttagcgttgctcaccaatgatgaacgaaccttgtcacggatgtagaggaacctgagaagactcagacaactcgcaactagatcagcatgtagaacgaggtcgcgttccgctgcttgtgtcagcgcatcttgaagcagcaagcgaatcgctgatgtcttgaaagctactcacgaaatcaccacagatctttgtgggtcagtttgctacttcaccgacgttttgaggttggtacgtacgtgattgctcgttcttgtcgggggaagaccacacctgaactgcgtcgcctcgaacaaaatcgacaagcacggcggcaacgtttccgtatcggcactgcgtgattaggccccggagcaattcaaagctggcgacatggataaaatacaaagtgttaaacacaataattccagctggggttgatagctatccttacagatcgatgggcgagactttggagaccaactcttttaggacggtcagcgttgccgatcgatccttggccgccagaaacgaaaccatcgcgtttgtgatgacctgtatcaatggagacatccagtctctattgcgaaaagctggaggagcaagaaaaagtgaccagtgaacatcggggcttgattgcataagatcactcgagtaaacgtacacgcagcttgttcgcgaaatgacagcggcttctccgtctcggaattgcgtttgtgattgacatggagggtcagctttctcaaaggacaaagccgcactgcagcttgcaggagcttaagtccacgcaagcggtcctgtaacaatacacaaaagagcagattattccccaataatgtttcctaacttgataccacaacagcgtacttggtggtcttccgagtgaatcatgtagtgagagtacgcagctatatggaacaaccacgagaacggggacactacggccgacagagcacttggtccatgctgctcatctgtaagcagggcgtgcacgaaatttccgattccgcggtatgaccacgcagtgaacgcgtactcctgccccgaggtctgcaggaaatacttgtactgcgtcaagccccacccttttgccacctggtccgtaatccactgcgtatcctccacagtaaactcctccgcgtcgcccgccatgccatcatcatcctccgagtccaggtcagactccgtctctgagtcgctctcgtacgaaggcagcaacgctcgacggcactccaccagctcctctcggaagcgaagggttgcaaagatgacatgaagctccaccccacacctctgaatgtcagccacaagtcgcaccctcaagtcgctgagcccagaaatcccagaaacctttgaaaatagatgcaatagagctgcaaccagcaccgctcgttggttcgtggcctcttgctcgtcctccagagcgtcaacaagtgacaatgtcgactgtatcaacggttcgatgaactggagacccaggttgagcccctcttgcatcgaaatcgtcacttgtctagcgtcgatatcttgcatgtcatcatcgtcaactgttgacaccaacccgaacacttggcgcagcacgacggagcaagaatcttccaggaacctccagcgcttgcgatggatgtcgctcagagctgtatatctcagtcaatacgcttagacggagaataaattttatataggtagatagacctgcgtctcaccttcatggatcacttcgaattgcgcggaaataccctccacagacgccgcagcttgcaatcccgcgagcgcatccagcagctcttccttccccataattttggtttttgcggatatattttttaaccaatgagaacacttattcgataaaataggcactgtgatattgcttacagttaagtgagctcgacccgttgatcgtctgagatggctacattgaagtgatgtctcttggtgcgcagcgtgagcctcctcgccgtgtccagctcccgctcgagctccagccggatggaccttcgcatagtttcctccagctcctgcaggcgcttgtgcctgttttcctcgtctttgagtcgccgatgctcctccagcgaggagtggcgacgcaggcgatcgctctcttcgcctcgtctcagcttggcgtccgctagacggcgctgaaggttctcaatatcggactgcagtgctacctcgtctttctcaagctgcttgcgctctgctgtcgcctcctccagcgctcgcttctcgagcttccagaactcctgcgcgcgctcttctgcagggcgcagaggcggccaggacgcagccatgagactcggatgctcgtcgaattcagggaagtacagcattcgacgctgtaagacccgagttcccagagctcgctgcagcactcgagctgagtgctcgagacgctttaagttggcgaggtggcgatatgccctcgagtagtacctgatcttcgccttggagacggatattcgccacgcgcgctggatcgtccgagccgacttgtcacgccgtcgagcgcgttgatgccgataccagcgttgtattctcactgcattttgctgtgcccgaactctgcgcttctggattagagggagcaagaacctccccaccacggcgagactgagtcgtgtcttcttctccacgcgatgcctgcgccatttgcgctgaatccgaaacgaagcgtgacgtcggattctcttccttcgccagctcctgtatgaaaggaaatcaactaggaatcgctcagctcgagcgtgtcggtacgccgcttctgtccttagttggcagtatcgcctccaaatgtactggatgtaggctgcagtaacgtgctgcaactttcgttccatccgggaagcttcccgctcttccttcagtactcgaactcgctctgcttcggcgagctcattctctaattgctctacacgataggccttcaatgtgatagtcagcatcagcgggtcactaactcgaaattgcaggtttcggcgtacaaacctgttgcaaggctttatcgcgagcgcgagcttgcctcctcctggcgcattctacgacgcgcttttgccgatccagcgagttatccgagaagaatcgatcctaccaacgcgcatattaaaatgtgaggtggccacgatcgtagcattcgactccgtaacatttgactaactgcaatagttgcggcgaacgtgtactggcgaagatgctgctgtgagcttgactgtcgatgtagcaactgcgttgccgtagcttggaagtcaccgctactcatcgcgccaacgagacattcgccgctgcactcactcggagggaaaatgttgtctgcaagttttgctcaaaaatagttgacttatcccccagacgacgcgcccaccgacgttgtgcggtttcaacgttgggcggagagtctctcgtggcagatactgtattccagacgatgctccgtgagttgggggcgggagcagcttcatgtcgacgctgatcagtgatggagcctctccaccgcaaatcaatagcgaggagccatctcaagctcgaagattcaacacccgtcgacccagcaccgcccgggccagcttcgtacagcagaaactacagacagcgttgtcccaagcggaaaagacctcagcagagttgggccaaagctcaaacctcggacaaccgtacgcttctgccattgaaggatttgggtatacctcttcgatctcatgaccttcgttccttctcttcttgttgcaccaatagtgaggattctcgagtccagggggagatctacgtggatcggagtgtcgctcgctaccgaagcgccgctagtgtggtttcgtacactgatccagccacagccttctcctactcgacgagttttatgccaggagttcatttctacacattcctcgccgcgaaagaggctgctccaccacgaactgcgagaggaggggtgccaagtcacagcattagtgttaacaatgcgtctgggtcaggtgacaacagctcaagactcacagcgagaaagcagaatctggcgctgaagctgaacgtaccggatacgattttgtacggcgaaacggggcgtgccgtgtggatttacaccgacaaagagggatacgtccagcggttgaccgagtttagtgacaagcaagtactcgataagtttgcggacggtgctccggcaatagcggatgaacaacacctcgtggtctacaaagaacccatcactacgatggcgaaccagcaaaatagtaccagcattcaacaaggttcgccggtattcaactcgcagggcaatcaactacggctactgaatctcggagaggtcaagacgctattgaacggggtcatggccatgcacaagtcgttcgctctccagcagtttgtcaagtgcaatgggtccaaggcattcgttcagcgagcagtctacgaggcggggaagccgccacacgcgtggatgatcagcaacatcgagccatttcgagactcgagtgcgccgcaatccccaccctcgggaactgctgggccacagaactcgccgcgtccagggctgataaggtcaagtagctcgtcaactattacgacttctgttccggatggtcctgggggagttccactggtcagtcgactctgcacgagtgttcaaacggacaaaggctgcacgttcgtcaagctaacagagcgtgggtgtgcagctgtctccgagctgaatttgcgagtaagttgctgtctcggtgacatcctggcccgaatacgattcacttatcttttcctgcaatttttcgtttgtgtttttcagatagtgcggtatatcgagcagcgttggagagtttcactccagacatttgtggcggatttcgtcaaagatgctggtggggagtggtggctactgcaggtgaaggcgttccaggtgcagaacaaagtccatcctggccgtgtgttctcgctacctctaaagctgcgaatggcgtacttgaactatcgtgacacggtgatcctcgacgaagaggacgatgacaattttgacactgaggatcgacgcagcaaggctcgactgcgccaccgacgagcgattgttcctctatcacaacgacatattcacaaattggtccaatgcaagtgttgtctcgcagcctacccaagcagtgagctgtcgttcaagatgacgctgaagatgatcaacgacatgctcctgcggatccgatctcgtctgcccccagagaagacgctaccttttctctccgctgcattcgctcgggagctaccggagtcagctgttgcgtacgagtcgtggagtgtctgcagccactgttatgctatctacgagcgcgaccaacaactgcagcgcatcgagacgaaattctcggccgcgttgggcttgccgaacactaagacggtgacagaagggcttagtcgagttcaagatccaagctatgggctggacccgactgtgagcgcttccgtcatcccagcgcaacttacgttgtgtcgcttggtattggtgatcaacgccatctacgacatccctccggagctctacaacgctgaacaggagaatgctcgaatagaagcggccgcagatgaagttgcagcagcagaagggaggaaacgaacgcaacgtgcgaacgcgtcgcgcctgtacttgcgtatcaatgcattgggatataccgagtgtatccccattaaccctgacgatatcatggaggcaagcgagaaagcaccaagcggagcgcgtcgacggagagacagcactgccagctctctgagtgatgaagacgacggagcggatagtgatcaatcggagccgcagtcttcaagacggcagagttcctggcagcaactatcccactcgcagacgttccgtcagcaccaaccgccatcgaacaacaacgacgccaactactggctccccacgaacttgattcgtaccataccattcttcgcgccacgcacgccgctccagtcaaagttgaaggaaacaagcggtattacgccattcctcactgaagacaacagcgtccgagtccaactaatccgcgctacggagccgcctctccaagatccgatgacgtcgaactcgagacgaagaccgaagaaccggcgagcggcgctggtaccagccgccggaagcatgtcggatctagttatgcagatgcacggacctagtcacgcgatcgtgttgggatctacgaagatccgaatgacgcagttccgcagctcgtacgtgacgaagatcgactactacgcgtgcatggctatcaccggagagatgctgaatatcaagggaaacatcggcctcgagcgcgtgcgctacgtcgattccaaattgctcacgtcgcagcatcgactgcgagtttacaacggaatttttgtccctgacgagacgtacacaacaggtgatgccttgtcatctgagtggatggactgctttcgagcatcaagtactttcgtaagaaaaccgcctccgataacccccacagctcctgaacctgttgagattccaaagaagaccataatgacccaacggaggagcactaccggcaccacaagaccgacatcatccagaacttcattgatggacgaggatgaagaaatggacaaggagctggagcagatgatcgagcgagccaatttgaagcaacaagaggcccatttcagacaaatgggtcttaataactcccccgacaacaacgaggaggacgcgaaggcggcatcggccactgctataaagcaggagcttcttcgtgacagcactggtgctccggcaaagagtgcctcacaaatggccatgctgctgaacaaacccatcatttcaccgcgctcggagcttgctgaagctgaagacaacaacaactccacaccaccaaccatcggctcgtcaatgattctcccgtctcctcgcaatcgcaagtggatgtggtcgctcgtatttctgatcaaccaggcgcacaacctgcagtctcgagagcgttcgtgctgccgatgggagtgccactacacgttgttctcgcagcggcggtctgctctcgagcggctgccaggaacctcgagaactccttctggaacgctgtccacctcggtatcggcggatgcaattgcaactcagtcagcattgatgaatgcatcgcatctcgaggtgcagttcaactgcacgcacaagttctggctggcagggacgacgctcatggtgcaggcgtgtctgcgcaacaacccgacactgaggctgtacttccgcaacgacatgtacgcgtcgacccggagcgagtccgagggcgagttctacgccgtcttgggtctgtccaagctgctgcagacgcgaggctttgacacgaccatcgatatcatcgcggcccacgacgatccgaccataaccccgagggaggccgcagccatctcgaggatgccgccttacttgtccctctccgtgcagctctctcgagcgtccatcgacccggacgaagctgtcgttgacaacaagtttgtagagctcgggtgcacaccggaagggctgcaagtgctacgaaaagtgtcctaaaatcctgaacccatgtcctcaatgtgcaaggcaacttcaactttgtttaaatgctttgattggtcgatattcaccacattttcaaccaatcagcgcataataactattagagctgtatcatcgagccattcgaaccatgagctcgctgctgcaggggctcacgttcgtgcgccgctcggagggcgacgagaaggactcgaggcgtgtgaagaaggacaagagcaagaagaagaagaaagacagtaagcataagaagaagcacaagagaaagcgccgagaatacagcagcagcagcgaagaagaagaagaagaagatcaagtagatgagaagaagacacaggattctacccaggataggaactctctaccccgcgacgattggatgtcaatgcccttcatgaggcgagaggtagaaccggtagaacagttcaagacgcaggaggagctgcaggccgaagccaagcagaagaagatccaggaggagatcgacgccggtatgcgggagcccgtcacgggcatggtctacggtctttacgacccaaagaaccccgacgcggcccccacaatctccagcaaggtagtacggggagaagaagaagcaccaatggaggagaccgaaggaggagaagacgaagagatgacgctcttcggagacggaggcgccagttggcgcgccaagatgctcaaacgcgcgcaggaccgagcgcgtgcctctggcgtggctctagaggaggtagtaggtgagagatttggctcggtgagcgagctcagagagagcgcgagaggctccgcaagggagaatgcccacttgcagtacaagcgccatcgggtggaagagaaggaggagggtggtagaacgagacgcacgctcgagattggaagggatgccaaggataaaacgttgctgtcgaagtattcgagtagagtgcagcgctcggtgacgcaggatctggaggaggagagcggacgcggtgaaggaaggcgtaaggatcgaagccttacgcgcagaggcaaccaggaggacgaggaggacgaacccattgactacgacaagctacctgactttgaagaccgtggtgcgaggacgggggcctccagacgtgatgagcggcattccagcagtcgtccacgagagaatgacgatagaaactcgagaagaagcgactcgcgtcgccaaaagcatagtcgctgccgcagtcgtagccgcagtcgtggcaggtatgaccacgccaagcgtccgcgaagcagaacgtcaaacagacgttctcgctctagatctcgctctccaattaggcgcgaagcaactgataagattgaacgcaagctgcagggaaggagagagccgcttaagaatgagaagtcatcatcaccagctccggctgaagagaagaagaaagctccagctcctcgtgtcatcgatcaagcaaagctagaagctgagcgactgcagttggagaagcgtaatgcgttcctgtatggcaacaagaagccggccacctccgcggatgctggtggcgtatcggaatcttcaaccacttcgatgtccgagcagaacagatcaccagatactgtgggtatgaaggctcctgggtcaccagataaaagctccgtgtcggcttcttcggcaagaagtagtgccgacaaagaagacgagaaggctgagcttaacaagctggcagcgaaggccttgcgggctcagatgatgggcaagtctgctctgttccggaaactgacagaacaactcaatgagctggaggccaagctcgagcgtgataagacagctgcaaccgttccgcactacgaagcgatcactggtgcgctgccaccgctggagaaagaagacatgcggtatggatcgcgcaagggcaagaagaagcgtgcagatcccatggacgttggcgggccggatgtggcagcttcgcttgaggagcttgtgcgtgaagagcggatgtctagtgcccgcgtgggccaaggcaacatggattctattcatgctcggaatattgttcggctgggttcgcactacaagggcacggaagtgaacgctcagaacctctcgagtggattcgatgaggaggatcaagtggatatgaagatgctacaggagcccggctcgaatttgactcggcgtgctcaagcacaacgtgaacatgcactcgccgttaatgagacgaagaagtgggatcaacgaacgcagaaatgccagttgtgcatgaagagcccagctttcaagaagcatttgatgctgtcgttgggtgagtttacctacctagcagttccaagccggcctcgcctgcatcccggacactgcgtgatcgtgccgagtgatcacacgtgctcggctgttcaagcagatgaacagaccagcgaggagatcacgcgcttccaggactcactcgttcgtatgtgcgaaaagcaatatggcatgagcatggtgtttatcgagcaaacaagcgcacctcaccggaagaggcacacagtgatcgagtgcattcctgtggactccgagctggcgctggacacgccgctttacttcaagcaggagctgatgcaagccgatggggagtggagcacccacaagccgatcattgacacgagcaagggcggcattaagagtcacgtgccaccaacgttctcgtacttccacattgagtggcgtacccgcgaaggacgtggtggatatgcgcacgtgatcgaagatgaggacaaatttccacgagaatttggcgtcaatgtcgtggcaggcatgctggatgttacaccgccaaagtacggacgacgcgggggtggcaatcgccgctcagtggagaatgagaagaaggaggtgctggcgttcttgaaggactggggagcgttcgactggacgcaagatctcgacggcggagagatcaagtcacaaagctgagccagagggcgtcttcgttggacatgtatgtaatctgtgcagcggggttattctattcagcccgagcagaccttactctgttagtacactcagaacatcttcttgtttgcgtttgctcaaatgtctgcggtggggattgtcgcctggtaattgataggtgatgctgtgcgtgagatgttggtgagcatcacgttgtcgatggtatatccggtgtccgggatgtactcgtacgctgtcatacatagccacatggtaatacacgcaggtaagaccaacgcgctatggtagacgagggtctgacggcagcaacttacctgcgtatgtatcgataacgtcctccttggacttgaccacgacagttgtcaccacacactgcaccacaaagatcaccgcgtgaagtccagacgccacatatccaggagtcgctcgtcgcgggctattgcgtgcctccagcccctacacaaccatcaccaacagcttcagatagctgcaaacgcttcttccagttacgattgctcctcagcctacccagtagagagccccttggaaggccagcaccagcaccaagaacgaagctccgaccaggaatccaatctacacagcacccacccgtcagacagccctactagagtgcaaggtctcaatcaacagcttcaatgccgcaccgagaaggcggacggcgttttgttgaggatgacgatggccacgaacgtgaagaccacgtagacgccggcggtgactgcagcgttaaagcccacgtacggcgtctccagcaggaacatggtggtcagcagcagagcgcacgacagcacctgcagtgggtagagtcattttgcattaggatgttagtggggactctcccgcttgactcaatcgacgcgtcgagggcaaaccacagcgcggatggagatgaaaagcagagcaatggggagcgcctcgtcttggccatcagttggtactaggagatacgcaccatgttgccgcccagcgccgcgttgagcagcttgcggcgagtctccagcatgttccgccctgcttggtcgccgcttggacgcaaaaagtatttttttgacaatatattgtcaaattgctattgtcaaacttgaaacttgattatgtacgaccgagccatcagcgggaggacttttgttctcgcgcgatgctcaaagttgcaaaagtccagccctctacaatgaagtaacttacatgcattaaagtagaagggtcctgggctatcagtttgagctaagcctagtgttcggagggagcattagctttatactgtattaataagtccaatcggatattgcgcgaacgaatagcgccatgagtaaagccggctgaagcagtaggatgcggtggcgaagagtactgtaaccttatttcctggttgaaccatggtctgcacacgagcatcgattgcacaagcttacgaccacacgtaacggcctcctagtaggagtcctacgttacaaagtcctgacacaataattctagggcagtctcagcgacgaagcaatttcattccttcaatcacaaacagtccggcgagccagcgagcggcgttcatgagcacagccgaagaggggaaacgctaaaacatgcctatttcggcgaagtgtttgcaaaacatgttgtccactttaaaacatgcttaccgacaatcagacgattggtcacgaatggtaacgatagggataaatatcgtgacggtgccgacacatatgattttatacttagccagtgtatggctgtcatgatccaatcatatgtcgatgaccgattattatcgaatgagaagggcgatagatggtattttatccaatgatcaacgtgaggggtaggtgtatgtgctgccgacactcctgccgacgtataatgtaggcagggcggccgagatatgttatccacctatagtgaagttaagtaattaggtgattaaacacatattttgcacggtgccgacacttcacttgactttgtattgcttctgcttgcctgttcgaagcgttttgtgtggcgctttcacttgctctacaaattcaaccgagtttctcggcaacgctatttccgaagcagcattgtgtcatgtagaaagctgctttgggtgaggcattgttggtgacactatggccactgccgctaaggtaccgccgtcaatacatgtaagtgactccgcagcagttgagagtggtacaagaattagaaatattcactgttatatacattctattcgtgcaatacactacagcattaagcaacaccgcgcctgtagaaagcgccatcccaccatgcagcggcggcggcaccagccgcgccgccagtagcagcagtaccccctccgggaggagcccccccaagctcgacatcagcgagcgtgccctccgccgcacccggcgatcgacaactcgcagccgccgcgctgctgcttcgggtgctgctggttgtaatggcggtactgggacgagggcggctactgctgcgggggcgtggtactgggttggctctgcagctccgcgtgctgctgctgttgctgcctgcagcgtggcgagtgggcggccgccaggcggaggcttcttatcgggcgtcctccctcctcgtcttccttctcctcctcctcccactcctcgctgttgccctccgccgacctccacgcacttggtgcatctattttccgccgagcccttggtggtcgcaggcttcggggcctgcggcttggaggccagcgccatgacgcgcgccatccgagcgggtgcgagcactagcccgacgcgcccgtggccgggtacgagcaccgcgcgtccgtgtgtgagatggccgtgcacgtgccagcgggggagggctgttgtccttcgtacccttggtcatctcgccgtccttcgtgcccttgggccccccgccgtcctccgcgctcttggtggcttctcaccccggtttctgctgtctcttgcccgtcatgtcctgtgtgttctggggctcagccatcttggaggtcctgatcgcgcccgtgcacgaccgcatgccccgctcgcgaagcctggagggaagggggcgtggagtttgtcacggggcagcgacgcaaactgaaaatgcgagaagtgttaatgagtacagtagtttagaccaatcattgaaattcatcatttccaccaatgatagatagtgtcggccggtgtaggcaccgtcatggtatggtatcatattgaattgcaaaagttcggtctccataataatcatttcaatatatcattcaccaataatatgaatttatctcaattacttttatatggagattcacgttaaacttggtttttgtatagttaaacattttactggaaattgggcttcaataatagaaatttcaatacgaccggcaaccaataatacatatttccgaacacaaatacagtaattgcaattgaataattatttttttcgaggcctgcttcaaagtcgtattgtagaaatgacgggatcttaaaagctgtgattacagattgttgatactttttcaagatctcaaattgctcttgcgacgacagtcacgacacgcctaagtgtgattacgcaagattttcagatcttgtgatctgcgaaaagatacgctaatgaatttggagagaaactagagaactgtagtttctggagttgcttggaagttggagctacgtcaaatccgataaatccgaaataatctaaagctatataagagatagaataccggcgtatacggagcaacgtcaatttacctttgccacgagcctctactttttaaagtaagcctctattaaagtaaagacttcgaaacgtgacttataaaggataactatattttagtatgagatatttcattttgtgtcaaaacaaaatatttaaatatgtataggaataattgtccccataaatatgcgtacgcaatatatattattattataagaaaggatattcaaatataagtgtcaatcttaatatcgtatttgaaaatagctcattattattggactattagtaataataaatttgtaattcaaatataacaattacaatcatcaacaatacttcaaaataaggcatttgaatgcaattccagcattcatacaatgaaaaatagttcaatattatttaactattttaacatttgctttaattgtacaatttcaattaagaacaatatttttaaatagtgtttttttactgatatagccggcacaggatcaattcggagtcgcataaagccgtgcgtgtaacgcacgcgtttaactatccatcatatattgaagttgtatgaaagtacacttaataggtcatctgaataattatctagtcggtctctatcgatgatgaaccatcaatcgcctcatcaagtttcattcgaatcatttcccattctcacgcccgacccgaagacgcaacaccaggacgaagttaggtaagcatagttgtatgcttgcgagggcgctgctgcactaatagcttgcatatacttggttattaacagcgtggaggtaagaaagtaaattggtattatcgtaaatgtgttattgcactaaaaagtctgcttatcgggtagttgtggatgttcatattataaaacgcacagcgcgggcgtctggtgcgccgcaagtgcgacgcgcctaagttgtgcgctgtgcgtttacctgttctgttttcctggtactacttcggttacgaagtaggattaattcgatgcacctgatatgtggcgcacatgaagtaaaattttatgaaatcaagtaaagtcatttaataatttcagaaatcgcatggtttcttgaaattctcggaaaagtagaggtttttcggtggagtggcaaactagttgagtgggtgtgctcctcagacaggaattgcagcggatttgggccattttggcggatatgtacgttttggcggattacacaatccgctgttgcgtttgtggaacacaagaggcatctttttgggccgagtgcgttcaatgaggtactgcgtaggcgtagagcaagtagaaagtcgagcagcctgaaggataaatatgcactttacatatgcttctcgtcaatccgcctaacgaaagggttatccgcccaaattcgggaggattaattccgctgaatatccggcgatgaagcaggagtcctaaagtagttttagcacagccatcctacaccgacccttccacccctccctgccagtagcatcaagaagtcgtgccacatctccgaggcgattcgatcgcgtagttctaccatcccaacctggtcagactggtaaaagttgctgggactgtgttcttctccttcagcgactcttctcgtgtcatagttcatcgatgacgacaaggaagataagacctaggcaacgcacgccactagccgagtacgcgacggacatggaccgccccgacagcaagtaggctgacggcaatctctaggacaactagcctatttacaagcgttcattagcgttcagctactgaacttcttaatgcatgtccctccaccgttaaatacgtccttttaaaaggtgtgccccgatgagattaggcaccatgagcgaatgtagcgtgaagggatctgcgtgatattaagtccctgaggcttgtcctcgctcggagacgcctcgacgtttccagctcccacgtcgtgcaccgcagacaccccaaatgagactggggagttgcgctcgtcgcggttttcgtcagtcttgggggtatccacaccacaacctccaccgactacgggatgctgcttcaagaaagctgcttgtcgctgcctgcaccggacagggagggacacgaccaccgacgctcccactaccgtgccatgaaacgtcatcggtctagatggcctcgtcgtgcggcgtatcgtcatgatctccacgctcaatttgaagttcacgtggttcgccgacccgcttgttattagtcggttggaccgcgtcaccctgcaaatacttatcactccgaagcgggtcgttgtctggctacggctccgttggcgtcgtgctcattttgtcagcgtcccatcatcggattcatgagcggtatgaagaagagctgacggttgacgtagccgcagccggtttgctcttgacggggctagatagtgagtagttgactttcacaaagctggagcgctcgcccattgtgaatcacaacttgtgctgctgctgaaagacaattagtcgttagtttgttgtgagataacacaacttcctactctgatgggcataccgacatgtatttgtttgaatcgcagtgccagtaagttgttgtgtaacgtcacaggaggtagcaactgtattcagagtattggcgagtcctgcgcacgagtcacgaacaagatcgagtctcctacaccaaagcagaggccaaccgacctggttacgagctatcttgacgactgctcgtcgttaggaagtgtagctcaacgattccgctttacgcacgcaatgtaatccgcttattgtgataacaatatgttctggacttatgctgtaaaaatgcactgctgatcttggcaatttgatttcatagccccttatattttgccgtacagggaagactgactgcaatcagtaaacgcgcggataaagcaagcaaacgagacgactactgcagggagcctagtcactcagtagtacaacgaggaggagaagaagaaagcaagtgccccagcaaacgagggtgaagggcaaagacagcgcacaacaggcggtggatatggtgcacgcagtgagtattacagtccggcaacgacccgagtactcgaagtcttttggcaaacaagggcttggcggaggacttgacgtaagcttaggtgtaagtaaaggcaactaattgaacctctaattgcatacactctatcccataatacacgtggtttaatgtaattttacagtgcaatttggaggtagcggattccggtggacgtgttcctcatccagtttagcggatagcggaatccgctgaatgcttctcaattggcggattgctcaatccgatggaatcaaacagcggtttccagagattaagggtaaacgttaagtacgacggtgccagctctgaaatgtttggatgcccggtattctagttggtatgcaagtggtttgtgcagcgatttttgatctactaaagcgcggagggtgttcggcgcgctgctaccaagatagaataatgctaaagtctaatacaaattcagcactgcgcgcctacgatagcatgagcgatggcgagatgatgaagcacaggtggtgataattccgatgcggtgcaagtccagctagttcggcgccacagtagcggagtttttttaccgtgagcacggggggggggggggtactgcggcgaccgaaaaagctgaactgaggaggagcctagattgtggtcgttttacttcttgtcttcaaggaaggatccgtagtctagatcatttgtcttcaaggaaggatccgtagtctacaccttttcaacttcaaaatggcaaaaagaaaattcaatacgtcaaaatgtacaatcaaaacgacaatactttgtaaaccgatacttagacctgtttgtaatagtgggatatatagaaatacagcgtgtcgaatatctattggctgacagtgagctgtatcagccaatcgtgctcgtataagattgtgagacggtcctgtctctattcgtgacagtttgaacttacgttttgtcattttgaactagcaatttgccattttgaagttgaaaaggtgtagtcactcacaaaaaatttctgcggatcatcgtacctagcccaaatcactcagtgcgaactcccaaaggaaaggtccgtagtctaaatcgctcaccatttcccggaaatgtgttggaaccatctattgtagtcaaaatcactcgatgtggtagaatagcatcaaagttcggacacaccaattttcgcattgcaatatgacactagcaaatcacctatcagaagcctttgtcgtactgtttggaccaatgggagtgcttcaaaggtcatgtgcccgaattgtccgatatgttactaacagcctaatgtctgatcctaaaaaatatttgatatgatcatagtgaaagcaagaaaatctcatattttaaaaataccgtgctcgttcggacatatatcgatttgaacagggatcttgcaatgcaggaaggtcgccatcagaagagcgttcacgtcttgcggtctcaatgctcctcgagcacacctctgcagaaaaacaatgcccatccgctaaatataatacaaatttatttagcttgaatactgcgtgctacctctctcaattttcgcttctcctttcgcggtaacgctggtccttgaacgcttggtcgtctccgctttcctccagctcttctggtagggcgatgtctcccttcagcgcttcttctcgacgcgcagcttctgcaacatctgccccgcggagatcgctgggcgcgcttaagtcgatggtcgtccccccccatcagtcagcaggccagcgccaatcacttccacgtcggcctgcccctcctcaacttcttcgtctggttcggcggcctctgctccttccttcttcgcctagcgcgaccgcgtcgacaggcccgccctcctcctgcagcaagagcagctccatctcgcgggtctgcatctgtcgcgccatcgccgtctcatccagagtctgcgggccttctacggtcctgcagcaccggcgcgccgccgtccacctcatcgagttgctgctgcttccgccgtactggaccggggacgcagctgcagtccaaccccacgccaccgcccagcttgcacagccccggctagtccagaaggcctccctccgagaccacagccgcatgcctgctcctgctcctcctgctgctgcgcgtcccggtctcgagggcgggctccggcgccaacttcaccgccaacaccatcacctacaccaacgccgccagcactgacgctgctgccagcatcaccgtgagtagctccgtcaaatccatctcctgcaccgcctccgccagcaatgccaccgccgccgtggctgccgacaccagctccggcgtcagcaacaccgcaacctacccgtccgccctgctgtcctgcgtcacgcccttctcctgctcgagctgcagcctcgttgtcgtccagcctgttctcccactcctccactcagccgccatcctgcacggcgtcctcgtctcagcctgctcgtcctgctgctggcctcgagggccatcaccccgcccgaggcctagtctgtaatggacctaccttggctcactactacggcttacacgtatgcgcacgtgcatgaggaatcgtaggattcttttgcttgagttaagtatactcgagatccacgagtatactttaaacaagataaagaatccaagtagcgggttttggtagaagatgagaactgctatttttgttttatgtttctgacttcctctaaatgtaatattctaagatagaaacctgccaacggctggttggcagaattccaatgctatgcatgtcgctcattggctaaaagatgctgctctcagccaataggaatcctaagtctctatggaccacccgtcgtggtgatcgtaaatgtatgtagcctttggtgtgtctacgctaaggtcgagaaagtctttcgaacctctaacagacgtcgtgtctgttacagttacaagtgattgtagccacttgtgcgtgtaaccccgttacaccatccccccgtcaaggttagacgtgccggtcccagcacgtcaaccaccattgaccgcttggtcaatgcgtgacgttgaagagagcgcgctcgtaatggaacgagcgcgtcgaagttgaagaccgctggcgcagcagcggagaacctctctgctgctgagtagcatgcgcggcaacgtgcgaagcgcgtcgctgccgcggggggcaggtacctatgtctgccctcgaagtgtcttcgggcgctgctgttagcagcagcgctcgcattacggtccagtatgtagcgcatggtgggcttcgtatgccctcaccaagtctgaaacgtcctgcagcaggacgtcccgtggctcccatgtatcttggtggggcggaaaccctctccaacgaatacgataacgaaccagctgccggttcgttttcgggatactatggttcacaatacgttcaacaatccagcgtgttgagccgcgggcgtcgcggatcggaggcggcggtggtgggaacacgccccgggtatggtcaacctggggttgaccttggcccgacgctcgaggagcgggtcgctgttgtggaacagcatcagagccgtgagttcgccgctctgaagcaggagatggcgaccctgagagatcaagttgatcaggcctcgcagaccgcgtcggacatctctgtcgtcgtgggaggtcgcgtcgcgcgctcggcccagcccgttcacgcgctggagtagaggttcgcccccgctgggacttccgcttcgggccagccgagctaggtggctcgtgctgccggtatggcttcagccgcccgacgtaaaaggtcggatggaggcgcatgctagatggaatatctagcgtgtaggcgttgccataccgtgccaacaccgtgaacggcccgatgaagcgcggagcgagcttgctcgccccgaagtcggaaactgcatgttcaggcaggttttgagttgctaacaaaaccaatgaacccttcttgaattcattagtgttgcccctaccaacattgtctgcattcagcttctgtcggtcgacagaagctgcaatagcgtctcggacaaaccacatgacggcttgtctgcgctgcacgaagttgattgcgtccgagttgaactcgttcagctcgtttctagcagtaggcccagcctctgcgtttgtcttcgtggtgtctgtgccctgcacagacacgtgcttcttcttcttcttgcgcgtagtcgcggctgctgcgttgcagtcgtagatcctcccccacttaaggaaggacccaccatcccgagtagactcgggtggcgtgggtgcctgatgacattcacgtagaacggtgtatgcccggtcgaggcatgcaccgagttgttgatggcgtactcccgccatcggcaggcactcgctccagtgttggaacgagtgcgcgtagctcttaagcacgtctacgagcacgcggttcacgcgctcggtctgcccgtccgtctgcggatggtccgcagtcgacatcgaaagttgactcccaagaagtgtaaaaacttcttgccaaaggtgtgcagtaaagcgcgggtctcgatccgacacaatgtcgatcggcatgccatcgtgtttgaacaccatgtcaacgaacagacgtgccgtctgtttcgcagtcacttcagcgggtaccgcagcaagatgtaccatcttgctgaagcggtcaacaaagaccacaacgcccgtgttcccctggctgtccgggggaagaccgaacacgaagtccaacgcggtccgcgttgtcgtcgactgcactgtagagtaataacccgtcgtgcacccggtaacggtgtgcacgagcacgaagatgcttcggcagcttccgacgagcttggtcagaaggcgctgagccgtaggccagcaagagctgcgcgtccgcgtcgtgcgcgtacgcgaccttcacgtcgtccaacagtgacgacgtcggggtgctcaatcgcatggcgtcaatggcattgacgtcggcatcagtcgtggcgtagtcaggtcgacgcgagagcgcgtcggccaccacattgaatcttccgggtttgtactcaacccggaagttatactctgcgaagaatgagagccatctcgccattcgttgcgagatgtgcggcgacttcacagccgtccgcaacgacgcgtggtccgtatagaccacgaacggtttgcttccgagtagatacactcggaacttcgcgagtgcgtacttcatggcaaggagctccttgtcatgtaccgggtagttgcgctcagttggcttcagctgacgcgattggtagtagacgacacgatcacggccctcgtgatcgtgctgcatcaacgcacatccgattgcgaagtcggatgcgtcacacacaacgtggaatgggcgatcttggtcggccaccgccaagatcggcgcctcttgactgcatcgaaggcttgctgatactcagcagtccaattccactcggcgtccttcttcaggagctgtgacagcgggcgtatcatgcccgcgtagtccttcacgtacttgcacaagtacgtggccaagccaaggaactgccgcagttccttgacgttcgacggcgtcggccactcattgatcgctctgaccttctcagggtcagggcggacaccgttcttcccaacgagacacccgagcacgggtatctcgctcgccccgaagatacacttcttcaggttcgcatagagcttgtgcttgcgcttatgcgcaagcagcttccggagatgcaccttgtgcatctcaacatcgctcatcccgtccgcagcccggctgtggacgaacacatcgtcgaagtagctcggtgcgaagtcgcgcaccgagcgcaaaaagtgcgtcacgcacctgttgaaggtcgcaggggcgttcttcagaccctgtggcattactagccactcccagagcatgccgctcggcgtgctcacagccgtgagagggatatcgctctcccgcatgaggatctgatagaacccatcgcgcagatcaagagcactgtagatagtgctcctggccatcgaatcgatgatgacatcttttcgcggtatcggtgtctgcgccggtatcgtcgcatcgttcagcttgttgtacgcatgaacgatgcgccagccgccctgtggcttcttgacacagaacgttggagcactgtgcggggacttcgattcccgcacttgtccagctttgcgacgactctcaaagaagtcgtcgatcgccttgacctgctctcgcggcggtggccactgccgcgcgacacagtacttcgtccccggcacgagatcaatctcgtgctggatgcccttgtcctgcggaagttccgcagggatctcttccggaagcacgtccgcgtactcccgtaagatctcgtagtagggactcgtcttcaacgagtcccagctctgctcttcaaagcgctccttcttcgtcttcgcactgagagtgtcctcgctctcagtggtgctctccatgaagaactgcctcacttcttcattctcgctcttcgttctctcggcgtccgagagaatgcatatttgttcgatgcgtccatcgtgcaagtcacgcgcgaagcgcttccagctcatgactggaagcgaagtcaactccgacgcttgcgtcggagggttagcgagagtcatctccctgtaccggaacccggcacaggtacgcgtcaagacgctcaacgtctcgacgtccagcttctcaacccccgtctgcccggcagacatataacctgtgacgattagcgcagaagaccacgacacactgctcgcccactccacgaatttgggattgcgagagaaccgtacaagctcctcagcagccgacacacgcgcccagacccatcatcgaagaagtcgggctgctccatgtaaatctcacagtcaatggagccattcaaaaatgccgtgacaaaatcaacatggcggaccagcaatccatagtccaatgcaagcaggagcaccagcttcactgcctctgcactcaccaccggagcgtaggtttcccagtagcccagcccatatttttgttggcacccttttattgtagcgtctcggccccaggccgagacttgggcagcgaccttcgcatgcgccgtcttcttgttttgcggagcccggctccgcttggttcttgacctcgtccaggcccagctgtggacgggtgttcttcttcagtaccgccggcgggttcatccgcgggcgagcgacttcaagccccgcttggtcgcccggcgcttcgtcgtgcagccctgctgcacgacagcatgcaagtttttccggtgcgggacgtttgcaaccgtccgcaccgcttgcagcgtcggctcccggagcagacacgccatcttcacctcgacgcctgttattggcggagccctccattacggagggtgcgtcggctccccgagccgacgaatcaaattcacccaatccatcgactcccggagtcgacggcatttcgtcaccttggctcttattattggccagacctgatccaataagattcgcgtcagcctccacggctgaggcgtggctgaggcgcgtgactcgtctgcgtcatccgtgtcccttgaggccggagactcttcctgattcgctgaaaagcgggtgtcgatctccgagatcaacacattttctccttcagcgtcggcggcgacgccaacgcttgctgctcttgcgcgcgtgctcgcgcgcgcccagggcgctccgggacagcggcagtaggcgctgtctcgagaggggagtcgcgcgcacctgtcggtgcgtgcgtagcggcaacagggccatcgctcactgttccgctgtcgcgaccgaagcgcacgagagtgcgcttctcccaatcgatgaccggatcatgccgtgcaagccacggcatgcccaatacaatgtcaaacttatcgtccagatccaggacgataaaggtctcgacaaactcttggtcttcatacgtgaagcgcacgcgtaccatgcgcttctcggtcttcacgacggtacccgttgccagtcgtacctccaacatacttcgaggtatctttaaatcctcgaagtcaagccttgatagacttcgcagtcgaacaaagttgttcgacgcgcccgaatcaaccaaagcacgaagagagttgctctctctcttcgaagacacgttcaagatgactgggttcggtttgtcatcatgcattttgcagtgagaagggtcctcactgggggctgcagtcctcagtgtcgcatgtccgagttggacacgcggaactgcattaccagtagggcgccccgcgcctactgggttccagcgttttttgtttatccgcgacgatgcccggcatcgccgcgtcgacaaccatctcggtgcacgggtgccgtgcactctcaggcatagtgaccgatctttcgcaacggaagcatcgtacattatttccttgttgctgttgataatcaacagccgttgtattcgagaggtccattggttccggacctcccgctatcgcaatcggaggcggtcgcagcctcggcgtattcgcatgcagcttagcctgtcgcaggctaaactcctcctgcattgctagagtaattgcagcttcgagagtactcgggtactcacggaagagataggtcttcacaggcccatctctaaggcctttcatgaacgtgacgaccttggtcgcctcgtctatcggtttggtcacaatgttcgagaccaaataccgtgctctctgcgcgtaagcatggacatcatgcttgccctgctgcaggtcgaggaactccgccctcgaccggaactcgttttgcggtggctcaaacgcttgtctgagatcctccttgaaaccctcgtacgtgctgaagtacgtagggtcagagagtcggcgtccatacgcccaacttctcgctcgtccgccaaggcatgacatggaaaacgcaaccttggacaacgggtcgacgatacgtcgagccgcgatggcagtgtcgagttcgacaagccaacggaggagaggtccgccctctcttccgacatagttgctcacgtttagtttcaacgattgtccacgcggaggcatctacgacgccaccgtggtagaggaagcagcatcacgctgctccttcatgatgaaccccagagcaaaccatgttgctctgtcggcgatagcgtacgcagcatcgcagctactgccgcctccccaatgactgttgacagtcgttggagtgcctcccactctggatcagacaggtggaggcagtcagcgcgtgcaacatgagttgcaggcgaagtggagctatccatgggcacctccgcgctcatgaaaaggttctcggctcctcgttcgtacagctccgtacgaacgttcaggtagtcggtcgttggacggactacaaagtgctaccaggtgtaatgggcctaccttggctcactactacggcttacacgtatgcgcacgtgtatgaggaagcgtaggtttcttttgcttgagttaagtatactcgagatccacgagtatactttaaacaagataaagaatccaagtagcgggttttggtagaagatgagaactgctatttttgttttatgtttctgacttcctctaaatgtaatattctaagatagaaatctgccaacggctggttggcagaattccaatgctatgcatgtcgctcattggctaaaagatgctgctctcagccaataggaatcctaagtctctatggaccacccgtcgtggtgatcgtaaatgtatgtagcctttggtgtgtctacgctaaggtcgagaaagtctttcgaacctctaacagacgtcgtgtctgttagagttacaagtgactgtagccacttgtgcgtgtaaccccgttacatagccactgtccgccccgccgccacacatgacgcccccacttaagcatgctgctgctggccctgagggccctaccagcagcggacgccccgcccgacgccaatagctatccacaccgccatcgtccttcctgcaactcctgctgctgtcagcctcgactgcagatgagaggtgctgaaagtcgtgtacttgctgtctgcagagctgtaggcgtagcagagttgatctcagcacgaaggtgcgggcagaagacgaacggaaggtaggagactgaggttgccttggcagaatgccgtggcgggaacaaccaaggcggcggagctggttgcgctcctgctggagaatgcggaagtgagtgccgagctgcgcagcagctcggcgccgccgccttgggacccttgctcgtgttgaaggggtttcctaaccgacctatgctttgctatgctggcaggtgctgttgctgctgctgaagctgctactgtgctgcgactgtcggttgctaaccgctgccgcgcggggcaacgagaggtagcgacctctcacagtcgcagcggtttctgtgctggcgcctgcgaccgcgtgccgtctgtccgcgctgcggagcactgcttggtggcgctggtaccgctggtacctcacactcccacacgctcgtggcgcacgtcgaggtgatggattgtcaggttgacatctttcaagtctgcaactagaggcttcacctcgcacgcgtcgcgagcgtatgtaagaccccactgcaatagcgaccgcaggtggtatttagcttgcttgggtgtctccttgttcatcctcgtccgtttgcgctgcgcgacttcgcaccgagctacttcgacgatgtgttcgtccacagccgggctgcggacgggatgagcgatgttgagatgcacaaggtgcatctccggaagctgcttgcgcataagcgcaagcacaagctctatgcgaacctgaagaagtgtatcttcggggcgagcgagatacccgtgctcgggtgtctcgttgggaagaacggtgtccgccctgaccctgagaaggtcagagcgatcaatgagtggccgacgccgtcgaacgtcaaggaactgcggcagttccttggcttggccacgtacttgtgcaagtacgtgaaggactacgcgggcatgatacgcccgctgtcacagctcctgaagaaggacgccgagtggaattggactgctgagtatcagcaagccttcgatgcagtcaagaggcgccgatcttggcggtggccgaccaagatcgcccattccacgttgtgtgtgacgcatccgacttcgcaatcggatgtgcgttgatgcagcacgatcacgagggccgtgatcgtgtcgtctactaccaatcgcgtcagctgaagccaactgagcgcaactacccggtacatgacaaggagctccttgccatgaagtacgcactcgcgaagttccgagtgtatctactcggaagcaaaccgttcgtggtctatacggaccacgcgtcgttgcggacggctgtgaagtcgccgcacatctcgcaacgaatggcgagatggctctcattcttcgcagagtataacttccgggttgagtacaaacccggaagattcaatgtggtggccgacgcgctctcgcgtcgacctgactacgccacgactgatgccgacgtcaatgccattgacgccatgcgattgagcaccccgacgtcgtcactgttggacgacgtgaaggtcgcgtacgcgcacgacgcggacgcgcagctcttgctggcctacggctcagcgccttctgaccaagctcgtcggaagctgccgaagcatcttcgtgctcgtgcacaccgttaccgggtgcacgacgggttattactctacagtgcagtcgacgacaacgcggaccgcgttggacttcgtgttcggtcttcccccggacagccaggggaacacgggcgttgtggtctttgttgaccgcttcagcaagatggtacatcttgctgcggtacccgctgaagtgactgcgaaacagacggcacgtctgttcgttgacatggtgttcaaacacgatggcatgccgatcgacattgtgtcggatcgagacccgcgctttactgcacacctttggcaagaagtttttacacttcttgggagtcaactttcgatgtcgactgcggaccatccgcagacggacgggcagaccgagcgcgtgaaccgcgtgctcgtagacgtgcttaagagctacgcgcactcgttccaacactggagcgagtgcctgccgatggcgggagtacgccatcaacaactcggtgcatgcctcgaccgggcatacaccgttctacgtgaatgtcatcaggcacccacgcctcccgagtctactcgggatggtggctccttccttaagtgggggggggatctacgactgcaacgcagcagccgcagaatgccgatcacgatccgtctcgatccaatcaatcgaatcggattggttgtttgctacccatccctgcatacaccgttctacgtgaatgtcatcaggcacccacgccacccgagtctactcgggatcgagatgtactttctgaccgatcggattagccagtgacgattctcgattcatttcgattagatccgattgatcggtcgatccaatccgactaccaagatataaaatacagcagtaatacctctagaaaatgcttctctagatatcgcattcactacatgaataatttttaagcgacccctgaaatgaccaatagcatgtttccactctaatctcttatacattttatcatgtccgaaactataaaataccacagacttccgtacaaccgacgcttcacagcaaaagttcatgtgtggctttagtctgctcacgatagtgctggtgttatctattgaagtgcgctagatccgcgctgaaatcggcctgagacttaatcgcatgcggagctaagacaacatcggtatcactggcacagttctcgtagttctacttgttgtccaccaactcgaccaccacatttaatccgctcagcgacagccgaatctgcgacttggcggtgcgcggcgccaacaccacctcgacagccttccaccagctcacgttacgcgactgaaactcggtaggcgcctcccacgcatcgccgccgctgctgctgttgctactgctactgctgggcacgcactacagctgcgcgaaatcgttccagcgcgtgaccgggtgctcacgcactttacgttcagcacaacggacgcgccaccgctaccttttgagccccggtacggaatcccagtgcaccacattactgggcggtgattcatcgcggattcgcagtaaagcaattggtccaatcaggtgtgcacacgttgggcgtctgcttgaagttgtcgatcgaatcggccgattcaatcggatcagatcggcttaggcctgacggaccttgcgaagtagtgcatgcgcagcaatcttgctcgcagtttcgcctttgccatctcgcactaacgcacttctccgcataccttcatcctccagcgaaccaaggcgagctcctggtaatcgacgctccgacatctggaccttcattcgcgataacaacgatgggaccttcacctgtctgctgtgttccaccggctcagctccggtctggaacacggtggctcatactacgtttcggcgacacctgaagcggcagcacggagaagagtacggaggcgacgaagatgcgtctccggcggacacgagagtcgcccgccagacggacttgctcgcgtttgggttcgagcgatacgtgcggcagcgcacgttcgacaaggcggccgctgacaagcagctggtggccttgatcgtagcgaacgcgctttccctgagtctggtggagaaaaaggaatttcgttccttctgcagaacactacgtgcctccgacaagggagacggttcgaaagaagatcatggcgcgctggaggtgcgaaaaggagctgtcgcggcatagcattcttcaagatgttaaaaactgccgggtatccgccacgacggacttatggacatcagcggcaaaacgaggctacatggttgtgaccatgcattggatcaacgacgagtgggtcattaagtcggttatgatcgggtttacgggcgtggagtatccccattctggtccccgcatcgcacagtatctgatcgataccattcgagcgatgagcggatctctttttgcaaaactatgggcgatcactacggataacgccgccaacaacggaacaatgattgatgagatcaacgaaacactggaggaggagattgtgggctacgaccacggcttcgggtgccacctcgactccagagcctacggaagcagccgcatcccaagccaaggtcgttcatgtgcgatgtctggcccacgtttttcaacttgctgtcaaggaaaggcttaaacgatgcccaatcatggatgacagtgttggtgtcgtccgtgacatactgaaaaaactgtcggagtcgccgtcgttacttgaggcgctgactgatgtctgcgcggcactcaatgtgacctttatatcgccggagctcgacgttgtgacgcggtggaacagcaccttaacgatgctttcttcagctcgttcgctgaagctagcgattggtgagttacagcgacggattcgtggccgtcatgaaggctacaaatgcctttcaataggccctggcgatcgtctcgctgctcccatcccggagacgacttggggctatcttaatgagctcatagctttcctgagaccgatcaagggcgcgactacactcatgtctggcaagaactacccaacctttggtgtagcgttggttgtcttccatctcgtcttgaagcatgcggggaagacggcggagactgctctctcgtggtacaccaaggattttgctcgcgccttcaagaagaagcttgacgagtatatcccgctcgtcaaaaccgatgatgctcatattgctgccgttctcgaccctcgtgcgaagtcgttcctcgtcaagattgacgtcaatgtcgagcaagtgaaaaaactagtcgaagcggagtatgaacgcgtgtatcgggccccatatgagcaaaatgaactgcgtagaaaacaatcggagaaaacccagcagcagaaggaagaagctgaagacgaggacgcgctgtacagccttattgatgagcacattgggcacgagtcgcacgcaaacagcagcggtgagtcattttcaagtgagttgtctcgctggcttgaccacaaggataagtccatgaacctgaagacaggcagtcgagctgtgtgcaactggatgaagcgcgaagcggcatcatttcctcgaattcagatgatggtgcgcgattacttggctgtgatggctacttcggtgcctagcgaggaagcattctctgcatctggaacgacgattacgcctcgacgagctcgacttgctaacgatgttgttacagcgatcatggagctgcagcattttcttgccttcaaccttacctcgggtgatgtccatgctgaaccaatagacattaattggactgagagctagtgtgttggtggtcgcagtggctttaagtctgtaagagtcgcaatcgttcataatgctctcgatccaattcgcctttgatgagctctttgcataatgacgagtacatagcgcttctgctacaacttgatatgtggtaagcttttgtaaaacaaccgggttgcactctaggaacacaataccatttttgtgcagaatcatctcaaacgaagtctggctcgccgccttggacgagctcgaagagcatgtatcgacatcgcgtggcatgatgcactcgctcacatggcgcacagagacaagcggataatcgtgccgctgtgacgttaccccgcactcaaagccttggaaaatgaggcgaagcgctgctcaaaccaccacaacttctgtgaggcggccactctaaagaaacaaggaggagctatctccaattgctcaatcgcaacgaggtgaagcgctgtccgataatttagcacctggacacccgacgcaacgaggcgaagtgctgccgcaatttgaagtggttcgaaggtgtgaatctccaatcgaaacgaggcgaagcgcagctccaattaatcactccatggggtctgaatcagggatgcgaagcgctgctcgagagtctccgcagaggcggagcgttgcctgataattttgcgactgaagaggggcaacgactagggaaaacgaggcggaactgtgctcgattgtgtgcgatttcaaagtggcggggccactgttgtcaaacatgtctgcttatccaggcaggttaacaatgttttcaacgcagatatcgctaccgaaatgcggttgtcggactcaaagcctatctggctgttgtttcgtgcgaaatgtagtgacacaggagggtatggcgacgcgaaattcaaattttaagcgactgcacgttggttgcgtcgctagaaatgacaatcttgcgcatgtcctacgacttgatcgataccggcgcattgacgccgtattgaatgtcaagtacgcagcagagcacgacaactcaattctttcggtgatgtcgaagtgatggtgccctcgccgtgtttcagggcgaatatgagcgggtcgccgtctcaacaagctgaaagtggaaaatcgcggaaaacgagcagtggggcgattaggtagtagttcctcgctgagactgcgagctattgtcttgcgagcaaagacaattaatttatggtggtcatcattactgtaggatttcccagcaacagagagaaccgggtagctggtgcttggtattttgtggcttccagtttgtctgtatctgcttcagctgcattagattttgaaaatcttgtattgatttctggttattggcgaactatacggctatctcctggtgattatgtttgtttgtggtggcgatgcgataatttcgaaccgtaaactctcgcgttggacttttgaccacggaatttgcagcttcaagccggttgagctcacgaaaatgagcgtattttcgcgatatcagcgaattcatgtcttgtcgactcgagtcggctggttttagcgtcgttaatcaattagtggcaaggtcttgcgctagaccagcccgtgagcctagtattcaaagcacatgcaagtctcgaggttgtcccgagtccactgagtcgcaaattgttatcgtagcgtgctctgagagtacacaaatgcgtttgcttgcaactcgaacgcgcccagtgtcttcaattattcttgatccctccatttccaattttaccggcttccgcacaatcagcgcactctccgcaatgtaaaagccatcatctattttcctctgcaacataccaaaactgatgacatttctgtcaacttccatacgcctgcgtcattcgtgcccaggacgcctacgaaagacttaacacaagaatcccgaacaacaggccaaatagcttctgtgcagacttgcaaccactttacaagctttttttttctgaaacgagaacgtaatgaaatccattgattgacaaaactgcactttggaagcaaaacattcatacagctcctcgagatcctcctacactacccacctgtctcctctgcggacaatgccaatggctgaggtgtcttttccacttgcttggttggcttcctggtacatctcgcgcagcttgaaggtaatcgggcggtcgcactcggcgatgatgcccttctcgtagatgacgttcttctgcaggtagttctcaacgaccagagccttgggcatgcacttgagcgcaagcgcctggttcgtggagccgtgacgtgtgattggcacgcggacggagacgtcggtgcccctggcacggaccttgtacagggtcgtcttggccgtcggagctgtggcgggtagcgcattgctacgtccaccgagaatcgactgttgcacgagctgcgacgctggttctcacgctgcatgttgtagttaagcttgtccagaactgctcgaaggcggcacgttaaagcgtgacgctttcacttgaccagcaatgacgcaatccgcagcgcaaggctggctcgccagtagagcgcattcagcaacacaaaagcccgttagctcagctattcacacacaccaccaccacatacacaaagtggcatccaacgtactgtaagtctgccacacggtcttcgtgtcgtcaagcgcctggcagccgatcgagtagaagcgcgcatcatcttgcaaccgccgttctcgcacgacaagtagtcgatggaggactcggtcttgacgttgacgttcaagtggctgtactcgctgtagcaatcgtccgcgtacagcaacttcttgtcgccgagtcagaactcgcacgaacctgtgtagatgagaccgtgagaggtgatggcattggcgttggtcggaatgggctgcggcgtgccgttccggttggtgaagctgtaggccgcgtcgtacagcgacatgccgtccagcatcggctcggggctctttgcagatgttggtcgccttggggcacttgaacacctcaacgcccttctgggtgttgccggcctcgcaacttgcgaggccagtcgcaagtgtggcgagaagcgggaggcctcttcgtttttgttttgtgatatcgactattgatagcatcacatctgcgaggggcaataccaccccaatttcaaccaatgagtccgtgtttcgtcagctatgtcgatgctttgtcgactcgatccgatccaatccgatcgagtcggcattgatctacaaatcagccaatccgattaaatgcgatcacgatccgtctcgatccaatcaatcgaatcggattggttttttgctacccatccctgcatacaccgttctacgtgaatgtcatcaggcacccacgctacccgagtctactcgggatggtggctccttccttaagtgggggaggatctacgactgcaacgcagcagccgcgactacgcgcaagaagaagaagaagcacgtgtctgtgcagggcacagacaccacgacgacaaacgcagaggctgggcctactgctagaaacgagctgaacgagttcaactcggacgcaatcaacttcgtgcagcgcagacaagccgtcatgcggtttgcccaagacgctagtgcagcttctgtcgaccgacagaagctgaatgcagacaatgttggtaggggcaacactaatgaattcaagaagggttcattggttttgttagcaactcaaaacctgcctgaacatgtagtttccgacttcggtgcgagcaagctcgctccgcgcttcatcgggccgttcacggtgttggcacgacatggcaacgcctacacgctagacattccatctagcatgcgcctccatccgaccttttacgtcgggcggctgaagccataccggcagcacgagccacctagctcggctggcccgaagcggaagccccagcgggggcgaacctctactccagcgcgtgaacgggctgggccgagcgcgcgacgcgacctcccacgacgacagagatgtccgacgcggtctgcgaggcctgagcgacttgagccctcaggatcgccacctcctgcttcagagcggcgaactcacggctctgatgctgttccacaacagcgacccgctcctcgagcgtcgggccaaggtcaaccccaggttgaccatacccggggcgtgttcccaccactgccgcctccgatccgcgacgcccgcggctcaacacgctggattgttgagcgtattgtgaaccatagtatcccgaaaacgaaccggcagctggttcgttatcgtattcgttggagagggtttccgccccaccaagatacatgggagccacgggacgtcctgctgcaggacgttccggaaatggtgagggagtacgaagctcaccacgcactgccgacgcgaaggtagtgcgagcgctgtggtcacctacagcgcccgaggtcccacgatcgtcgcgttcctcacgtgccaagaacttgacacggagatccttgagactcgcaggtacacgaatcgtcgtgtacccgttgaggtcgcggtcgctcaagcgcgccgcacccggaagacacaacgtgcactgttggccttcgggcacagcgcatggaataccagcgtccacagaagatctgtggagctgctccaacctcccgcgcgtcgagaatgtctcgaagcgttcacgggtgtgcttaaccccctcacggtaagcagccggcttcttgttgaagttctcaacaaaagcattccaactttgacaaagtgcctgccactcaggcactttgctgcgagaagaggtcttcttgctggagaagtatcggagctcgtgaaagagtccgatatagtaatcgcgcctttgattcgttaacggatcaaagtgctgctcctccgccacaacatcatcgtggatcccgctgcatacatacagcggaatttcatttggaggcacggtgttgcccacacggtctgcgatctctgacgcagacggcatccacggatcgcgcgctgcctgagcagcgcgcggagaacttgaagacgccacctcacgcggggagcttaaagccccagcagcggagagcggagtgtcgctctcgccgcgcgaacgcttcgagcttgaagcgtccgaatcgtctccttcacgagggcgtctcgacccggcatgcgggtcgaggctatcacggtcgatagactccttgcgcttgttggaagaggcctcgccctcttccatctccacgtcgtcatccccgtagtcaacggcgtcgttgactacagaggaaccttcgaggacaatctccgactgggttgtccccgacgcggcctttgcagcgagcgcgtcgcgctttgcctgctggcgctcatggtactgagcaacagagaggttaccctctgttgcggcggcggtcttcttctgcggcgagctcattgcggaatgagctcgagttttctttctcccaacgtgaagaattgacgaatggtcaatttcctgattgacgtgccgtgactcggcgcgtctaaccttgagggggggggggttaacagggttacacgcacaagtggctacagtcacttgtaactctaacagacacgacgtctgttagaggttcgaaagactttctcgaccttggcgtagacacaccaaaggctacatacatttacgaccaccacgacgggtggtccatagagacttaggattcctactggctgagagcagcatctcctagccaatgagcgacatgcatagcattggaattctgccaaccagccgttggcagattcctatcttagaatattacatttagaggaagtcagaaacataaaacagaaatagcagttctcattttaaacccaaaacattatttggatcgtttatttagattaatctatacttggaggcccgagtataattgactctagtttaaactacgctacgcttcctcacacacgtgcgcgcgagccaaagtaggcccattacaggacaagtacttgccgaggtgacgcactgcatgcgcgatatctggccgcgagccagacactaggtactgaagagagcccacaatttcacgatacggcagcttggtatcaggtgcaagtggtttccgattggccttcgactcgctggtcgattgcggtgtccagcacccgtacgcatcctgcatgttgaatgttttcaggatcttgtgaatgtatgcacgctggcaatacacgatcttgttgtgggttctgtcgatgttgatctcaataccgagtaggtacttgacctcgcccatgctcgtcagagtaaaggcactcttcagctgagttgcgaccttgttgcatagctccagcggtcccatcaggagtagatcatccacgtagacagtgagaagtatctgcacgtcactatcagggttatacatcgcgtagagtccgtagtcactgtccaggcgggtgaagccaatctcagtcagcagcttgtgaagagtcttgttccacactgctggtgcttgcttcaagccgtacagcgacttgagtagttggtagacgtactggcctccgttctcctcaaaccccacgggctgctccatgaagatgcattcttctaggagcccgtacaagaacgctgtcttgacgtcaaactgtaacacgtgccagccacgcttcatcgcgtacaggataactgctcgaacagtatcaaatcgaattacagggccgaaagtttcaacataagtccacaccaaactgctgcttaaagccatggattacaaggcgagccttgaaccgcaagatacgaccttgtgcatcccgcttcacagcaaagacccaccgatttgtgatcaccgcttggcgtttggccttcgccctggcaaccagtttccacgtgccatgttctcgtaatgacgcgagttcctcctccatcgctgctttccactccagccagttagtgcatgccttcgcttgttcataggtggtagggatcggaatctcggcgatggtattcaggatcgacccgaccacatcgtctcgcaggtgagcaggcagcttccgtttccttcgtggactggccagacgtgctggagtgggtgtgggaagtttgctagatggttcaaactcatcgctggagctgtcacttgagcttgagcgccactggcgcttgcgcttcttccgtttttgcttggctacggctggctgtaactccacacgtgcaggagggttacgaactcccactggctctgaactctcagcaatctcagtttccgcaggaagattcaacgacccttgtaccgctggtacgacgggtgcattcccagcttcagaaaatagtctcgcttccagggttgatgcgattggcaccacaggtatctcttcgggtagttcatgatcgccatgccgatacaggttcagtaggagtcgtcgtacatagcccttcgcagccgtaaacttctcgtgaaaatgaacatttccactgcgcctcgtggtcacagctccggttcgtagatccagtagtttgtagccagtagtttccgtggtatacccgaggaatagcgacagcatagaccgcgggtctagcttcgcgcgagttgtacgagtctcaggaggcacaaaagcatgcatgagacatccccacgtccggaggtgacgcagcgctggcgcctttccgaacaatgcttcatgaggcgatttcccgtgtagtggctccgttggtagtaggttcatcgtgtcgacagtgtgcaggaccgcttctccccataacaggttagtcgtgttggttgcatgcagaacagcccgtagcctaggaagaacggtgccattttctcgctccacaatgtcgttctcttcaggtgagtagccgttggtagtcttgaactcgatcccttcctttgagcagaatgcccgtagatagtcgttcacgaattcacctccctgatccgaatgtagtagcttaacggagtgccctgcacgcttgaactgattgttgagcttcaacaccagtgtctcagccagagcatcagcctcgtctttatacttgagcagatagcaccacttgtaacgcgtagcctctacaagcaagaagatcgtttcgccagttgcaatctcctggttgatgcagcacaggtctatagagagcttctccaatggatgctttcgccgattgggtcctcgcttgtaggttgtgcgtttgaacttagctgacaaacccggaacacactcgtaatccttcagcgacttcatgttaacgttaatgccaaagtcgacttttccactcgccaactctctgatcggcttcatgttgacgtggccaaggcggttgtgcaggagccccatggcgttcttgcgctgctccacagctccaacgacacgcaccgatcgcttcactcgcatacggtacagcatgccatgacagtcaaagcgcatcttcaatccgtccttgcacagccacgctgtactctgatcatcgttgagcttgaagccgcaggcacgcatgtagctaagacttatcagattcacgtgggcgttagacgagtagtgcacttcatccagacgacgcggctcccactgacccgagactccattcatcactcgaaacacgacacttccactcgcttgcatcgcctccgtctggccgcaggccagacggaggttgctcgaagatccatgctcaatgtatgaaaacaggtcaggtctccgcacaggttcacttgcgatccgctgtctagaagccattccatctcatcggcctgcaaggccggggcacgctggtcacgctgcacaactgctgcattgacctcaaagtcaagtgacgctggtgtcgtgggcgaatactgagtgcttgtggcaacaggactggatggcgggttggtcggagagtactggggggataaagcacgggcgggcatacctctggcagaacttcgtgcctgcagcttttcctgcatctgcttggccgcttggggtcctagcaccgcgagtacatctgccatcgtgagggattgactgctactgccaacctcatcatctgcacgcgaggtcatgcactccacgactcgatcttgcgaacgacgcgaggcctgctgtctcagcaccgcaccaccaaatgactgcaccgcttggtcaccggtgccgcgcaaggtttgtcgctttccctgcttgcactccggatcaccacgccagtgacctttctcgtcacaggcattgcacctcgggttcttcttctttttggtcattcgctcagcgctccacgacgagcttgaagtggagcttccactgcttttgtttccgccatacttgccgcctcgctggcgcgacgaagaacgacggggccttttccattgttgcggtgctgctgcactgaatttgtctgagcctgagtcgagagcccacgactgctggttgctccactactgccaggatcgcgctgcgcacgctgaagctcagcattctccaatcgcccgcgagcatcgcgaacggtgtatttgtagcccgggtcccgccgtagtttctcggtgacttcatcagcaatgaccgggtaggcagcatgcgctttggtcagcatgatcttagccagccgagagtccgagatggggcctttgttttcggcaagctcgcgctgcatcttcaacaggtcagcgatgtactcacgcaccggctcgtcggggcgcagcatccgcccgtagagccgctcccaaatcaatactgtgttgactcctcggccctgcccgaagtcctccttcagaacgcgccacagtgcgataggatcagcaaggttcaccacgtcctggtatcggagcaggacttcatcggagattgccgacaccaacaggccattcgccttgcggctacgactcagccagcactgcttcatgttgtacgacctgttgtcgtcaaacggctcctggccgatgacaagctgagccatgttggacacgttaatccccgtgagtacacgcagccgccacgctgggtagtcctccggcttggagagcttgcggtcgacctgcagggtcaccacagctgcgacacggttcatcttgtcttggtgctcgtctgagaggtcgacacccgctgctgagctgcctacgctgctgccgaaacactcgcctctgagcgcttgaggggagagtcagcagctgccaggcggccgttcccgcaagattggccaatgagcggtggggatctttggattcagccaatgagggcactgggacctttcgtatcacaggtgcccgtgagtgttggtcaccagccgactcgtgctgtcatttggcctcaagggcgctgcgtctactgcttgctgctggactccaccgggccgctgatcgtacccaccagtaagtcctctgtctccgcttcctaacgcagttgggcgcataatcggagaggtgctgaaagtcgtgtacttgctgtctgcagagctgtaggcgtagcagagttgatctcagcacgaaggtgcgggcagaagacgaacggaaggtaggagactgaggttgccttggcagaatgccgtggcgggaacaaccaaggcggcggagctggttgcgctcctgctggagaatgcggaagtgagtgccgagctgcgcagcagctcggcgccgccgccttgagacccttgctcgtgttgaaggggtttcctaaccgacctatgctttgctatgctggcaggtgctgttgctgctgctgaagctgctactgtgctgcgactgtcggttgctaaccgctgccgcgcggggcaacgagaggtagcgacctctcacagccgcagcggtttctgtgctggcgcctgcgatcgcgtgccgtctttccgcgctgcggagcactgcttggtggcgctggtaccgctggtagttcacagcagacactttgcccggccaaaccgtagtccatgccaccgctgtgtccgtcccactgctgctgctgctgcagccgctggccccgaggccgagcatctccccgaaaatgctaggtgtcccaccaccgatttgcaccggatcggacctaatgtgaccgtttgccaccgaatgtgtcccgctgcagtgtcccggttccccttcaacaccgtgacgctgctgtaacacactttgcctcttgacaaccttcgtagggcgcgctcgatctacacggagcatggtatgttgtttagaaaccctattttagtgtgggagtcacccttacatagtgcatcttcaatacagtgaataactgcgttaagggctctgttgcgggggcctacggcttcaatttagtgtcaggaggatgcattcgtgctctttcctctattgctacgatgtactactgaagtatgcattgcgtagcgggcctagaggacgtgcaactagcgctatcacgcagcagtcgctttgcgttcacatatatgtctccttgtttgtatctagagcatctgatagcgcggacttcattcctccaacaggtgaatactactaggcaaagggcctggacgtatatgcctctcgctcctatcgttcaggtcgtcggagataccaatgaacctgaacatccaagcctactttgcgttcacgacctagcaagtaatacatttgtgcagatactcctaactacgtcaaattacagtctgatagtgtcctgatagccttccacgtgcttccgccggcggcggagattgtcggagttcgggtgcaaatgtcggagatgtcggcctggcggccccaacatcaccgacaagtcccgagcctttttgctttgtgttatttttcagtgtgcgccacattatcagtgttaatctcttctccccaggtcgaaagcataccagtagcatgggtacaatcctactagtaggcgtaatttttatatggcgtttagtatgatgcaacatatgtatgtgaagagaaggctcagatagaaggtgatgcaagatgctcactgaagcaggcacggtgcgatcttggcccacacacaccgtaaaacgacttcaaatggacatccgagcagcctacacagtagtaggagcacttcttgtggcacaggcggcactgccgctgcacacgcttgcctgccttacgcgcttcactgtattgtgggagatctccaaaggctttcaaggtgtggctaggctggcgatcacataacgacgcactgtcagcatatactgagtagcgaatagagtctagcaaatacgcacctcatccgtactggtcgacccgctgtcggttcgcagagttcgcttcatggtgtgctcgttgaaaatgagttgatgagcgagctgggatacaaaatcgctgaaattcagcacggtactttcgacaaattgacgctcagtcgattcgtggcgataagttaggtaggcatccacaactaccatccccaggatagttccgaatactcgatgcatccagctctgtgtaatccattcacgctcaatagcaagcgatccctggcgaagatggtcgtggacgtcaatagtagagaacttactgaaaaaaagctcaaccatttgaggacgcgggacacgcttttcgtatcgctgtgtctcaagtttgccatcgcggatcacagtgcgatgacgagtgcaaatactatcggagtctgcgagggtagttccacggttcgatatcagcatcttgggctttgatccgcccagcacaacgcataaatgggttttccgttgtccgtaaaacttgacatgatcttgaacgaaccccgggtcggctgcgtgtcaatccaagttttcatgtggcactttggatattctacgcttgccgtttttacaatacccataaaatacagaccgagctttttttcaagttgcactagtgttttcaccgaggcaaaagcactatcagccacaacagttctccctgtgcctttgtatttttccgtcaatcgcaacacaaccgaggtaccctccccaaattcactacagtactctttgcgacgttggcgagcggtaccttccattagttcgagtcccagcaacacaccactatctccatctgcgagcgacttcaactctgtcccctttccttcaggtttgcgtgcaattttagtcacatggggaagtccatcgtgagtgtacttagcatcccggcctttccaggcactcatgcactcgtcgactacgataatgtttccaggagaaacatgcttggttctctgatcgttgaatccctgaatcaatggacgtatcgggtaccacgggtcactagtcgagttgttgtcggaaaatgaaagtgcgtacattatttgctcaaaacagtgccgtgtcatctgaaatctctccccgtagttgctcggagtattcacgcaaccttctttgtgttgtgtttcccaatagacccgcagggatccccgtcgtggctccacagccatcgctaaacgaatacctatccagcgaaaaaagtcacctggtccaatagagcgaaatgaacttgccgccaaattattgttgataagtcgaatagtttcattgagagtgcccatggggtacatgatgtagaagtatttaattaaggacttctccccaagctgaaggtgcgccgaccacagaaatgtagttgctcgcgaggaaaattgacaccccgcgtcaactgagacagaatcacagggtacccacatacggccgtgagcgaccacggtatcgtcgtcttcttcttccgagtggccttcgagtgtttcatcatcgtcactgccgtcgtcttcgccgctaggagaactctcttcctcccaaaccacttggcaggcaccctccgtgctgccaggtaccaatgagcccccatcgctgatttggccatctccagcgtggttcaaagtgacttcaatgcttattgagcgcgcggacacaatgtcaatagccctcgtactccatggacctcgtaagtgtgctgcctgccctccttcagcacgcgaaggatgactccagtcttgccagcgtgtttcttacttttaccgcaaacccgatttccaacctgcagctttggcatcttcccgcggtcaaattcgacgcggaatgaaagtctgaagtccttgttatctaagcttgctggtgatctatttatttgcgcgcgtcggttgcagggagagccaaattttatttttaaagttgaggctaccggtaggcgcgccatcctacttatcctaccgatggggagtaatgattaagatgaagttgtacgatcgccgaccggccttgccgagagggctacctctaatttatcatatagtctgtgttttctgtcacggtgacaatacagagtcatcacgaccaaacttgctgacagcaagtgctgcgtggagcgcaaatgtaggataagagagcgtgaccacactttattcatcgggccagatgcgtgaccaaacacctccgcttttttaatagccggagttctctgtaatccagtgatcgtatacagggtatatagcgtgcgtgaccaaacatctccactctagccggtgctctctgtaatctacatgaagtgattgaatacagggtacagtacatgtatgtggcgagtgttcaataactgctgcagacgatgagatcgtgaatcacggacagtatcgtcagtgacgggtttacgggcacaccaagtaaaaacaggcaaaacggcattttatggctagtatttcttaaaaaaacttttggtgcaaaaaacactcgatcatatcacgagtagtggaaggaacttactagaaggtcgcaggcacagcaccattattaacttagaatgtattactccattatattatttgtaattattattttatatatagtacactacagtattacattgtattgaattccaaacattaatctatataatatatttgtgtgtgacacttcttaactggtattataaaatattttaacattttttgcgtgacacttctcactaccagcacatttaagcaagtactgatacgatgcaaaatatgttatattgataaatgtttgttacttaaaagagttgtaattatgaatataataacaatagactatcatatttgctgtaaaagttgtatttttaaaatatctacaaatagaactgttgtataaaaccattaaaataagtacaaaaggttttattaataacagtaaatggggatttacaatttggtcaggtttttgagtgcaatgtttcagatttggaacacaactgcatgtagctttccaagttaggcaaggctccctcttcttgttctggttgcctggaaatccatgccctctgttagatgaataccaaggacggacgagcacacggcctgtgagtcactgcacttgctgtgttattgcagcccacagggtctgacatgagctcaaatcgacacgcgcattgacgcttcaagacgatatagttttaggtctgttgcaatagcgctctcatttgaagatacttcaataattacatgttccgtctccgcagcaatatcaagcggtagactacccagacaataggacgacttacacacaacgaagtaaaggtaaggtatgattcaacttgtttttctagctcggaaaacatgctgtacttgtcacttcgtctaaataagccatttgctgtgtgagttcgtccgtttccttacaaatacaaaccaacctgtgtcagcttggtctctcaagttgagagtctcaacgagattaacagtccacgacacgatcgagaggttttttctaacccctacatgttttggtatcacaaaaaccgccttgcttccctgattgcgaaaatgtgcgtctcactgtttagcacggcgtcgtttccacagaaacagcagtccaaattttcctgatttatataataaccaccccttaatatgtgcgctgattataaatatgccttgcatttgggccaatcattaccacccctatgatttttctcggccaatgataaggcagcggattagtcgcagagtcatgatcgtagagaaatgatactctggacggatgctcgttatcctcattcttccaccgatagatcgaaagatgacgtacagggctacaaatgtatcggatcatatttcttagaatcagtgtctagacttacttatggctatctaaaattttagctagtgtagtcatcactagtactgctttcgtcgctctcggagctgtccgaatcctcgttttcactgcggctatcataacttttgatctgagcattcagatccaccaagtgggctcttgctttgtcaatgcagccttgaacagttttcgacggcaaagttttgaaagctgtatcaagccgacttctgacctgttggaatgtagtatccttggtgtactggcgcccaacttctccctttacatttgcccacacatactcaatcggctgtaaatcagagtagtgtggaggcgtgaacactacttcgtggcccttcttcttcgccatagtcacaatctctggctctacgtgctcagcaatgtgccgtgacaacttttcccacatgatcgcccttgtatccgattcagcgtaaggcaagccatacaacttacaagcagcctgcatgtcggatctccgaatcccttttcggggggtgttgggcggcaacttcttgtgatattttgcgttatccatcacgatgcggcagtggtgcagttggcggtcttccagacaaatgagcagcgtttcaatccaatttttgaagtagtcatgattgaacatcccgtgataatccttagtttgcttgcctccctcaacaatgccaagcgtctccggcaaaaactgtgctttgtcagcctcagtatgatcggcatccgggaggttacggtctttgtcgataatggcagcgatgaagcaaaatcggcgacccttttgtttatcctttatcacgttggggtccgtcgggtcataaatggagtcattatgactggagtagttgtgatgtatataactttcgtcgagataaaccgttcgaacgcgatcggcactttcacatgccatcatctgcacgtagctatcgcgcttagtttcgttttcagctgacaaccgatatgtcgaccctttccgctctccccgcttgaaaccacatcgttttacgaagcgttggacggtgcggagcgctgaggccgtagcggcactgtcggtgacgtcgacgacaacaactcttgctgtatgagatggtgcatgacgtccttggctaccgtgcgctcacgaatcgcgctgcgctcacgaataaactcgcgcacaacctctccatatcaacagtcgccaatatacgggacggcttctgctcacggttagatggcgccgatgccacgggtagagaccgatacttggcaaagtcattccaaatctgacggactgtgttggctgagcgcgacaacagacggccaactttgactgcgagtggctctttctgacgtaatttgacagcgccagacttcatgttggctgtgacgatgaggacgtcaatacgttccaggagcgtgagagctctgccgcggttatctgttgtgtaagtttgagcttctgcgatgatttccgcctcggcgtcaggagtctcagttcgcgctcttttggaaggaggcatctcgataccagcgtgcttgctttggagcggtaaagtggctcagttgtcatcgaactacacaacccatatttaggttacggtaacgccgatttatctgacaaactgatactgtagccaatatctaatttggcggggtacaagtttatccagtcaaaatagccggatatcattggataatatacaggtgtgagtaggtgacgataaatgtgcccttgctgttccagcatattatacacagcacaatccaaaacagctctgaaaatttgggtcaaattgcatgtaatccggaaaagttatagcaaaaacacctctcgatgctgtcgcggtctgtaaaatggtttagtcgctatcctgggatctcacctgttgtggattctatgctagcgcgaatcccaagtggcaatcccgtatgtttcgttcatgcggtatgacgggcattgccggcaagctccattaattgttttactaacccccgaagagttctcgaacactggcgctcggcatgatactgcgggcgctgctgctcgttctccttgtggctgtttccggggccctttcagacaactccattcagctaagtgaaagttccggcggccctcatggcacagaattctccgatgaagcctccgtcagcgttggccaaactgtggactccattaccattcgggcaggcgagcgcgttgacggcgtctctctggaagtcacaggtccgaaggcggcaacattcaaccacggcggagctggtggagacgggaataccctcaagcttgcagcgggcgaacatatcacgtcgatggaagcgcattggggcaagaaagatggccgcacgcgcatcttctacctcagcttcggcacgagcgctggcaactcagtctcgggaggatccatgacggaagacaagaacacggtcaaagcacccgagggttttcagctcggaggtttttttggtcgggatggcgaggagatcgactcgcttggtgctatttgggcgcgcattacagccgagacagcagctccggcgaccgaaccccctcctccgccaacgaaagctcccgctccggagaaacccgctggctcaggtagcgtagaacctcctcccgattcatccgtcgcggcgtctaccgctgcatcgactgaagcttcagctgcagaacccgctgaaggctcagcggtagcatctacagaggcctcagcagaagcagcagcgacggaagcgccagcagccgagcctggaaagcctaaagaggtcccagcaaaacctgcaccgaccatctctgtggaggactcggtacaactaagtgacagcttcggcggtcctcacggtaccgagttctccgacgaggcttcggctacttcaggacaaaccgtagcggctattacaatcctcgctggtgaacgcgtcgacggtgtttcccttgatatttcagcgccgaaagctgcaacgttccaccatggcggcactggtggaacgaaaaacactcttacactggctaaagacgagcgtatcacatcaatggaagtgcattggggcaagaagtctggaagaacgcgcgtattttatctgagcttcggtacgagcgcagggaattcagttgctggaggaacaaaaacggaagacaagaactcagtgactgcacccgaggggttccagctcggcgggttctttggtcgtgatggcgatgagatcgattcgattggtgcagtttggacgagcaccgagctcgttacagcagctccgacagaggctcctgctcccgccccagccccggagccagctcctggtccagctactgacgataaaccaggaacagttaaacctgcaggcccagcgaaatctggagtgaagaatacgcgcgctaccatcctgagcgagtcgtttggtggacctcacggcaaccaattctccgatcagcctctcgccacctcggcacaaactgtggcctccctcactatccgagctgcggcgcgtgtcgatggcctcaccctcgaagtatccggacccaccgcccagacattcacgcacggaggacctggaggcaaggagaccaagctcgctctgaaaaagggcgaatacatcacgtcaatggaggttcactggggccaaaagagcggcaggacgcgcatcttctacctcagcttcaggacgagtgagggcaatacagtcgctggaggaacgcaaacggaagaaaagggcagcgtaactgcgcctgaaggctaccagctcggaggattcttcggtcgtgacggagacaacatcgacttgctaggagtggtgtggacgagcattgaaccggtcgcagaagctccaaagggaggaggtggctcagtgtcagatgaagatatccaactcagtccaatgtacggaggtcctcacggtgtcgccttctcggacatcgcggacatcgtgctcggacaaacgctaagctccatcacccttcgcggcgaagcacgcgttgatgctgttacgctgcaggtggcaaaacctgcagagttaacctggagtcacggcggcaagggcggcactgaaaccacgcttaccctcgcaccgggcgagtacatcaactccatggagattcactggggcaagaagagcgggcgcaccaaggtgttctacgttaattttacaacgagtgagggcaagtctgtggctgccgggacaaagaccgaagaatttgtgacggaaaccgcacccaagggtttccaacttggcggcctgtatggccgtgcggaaggcgaagtggatcaacttggcgccatttggattaaaagttcggctaagccagctttgcttaccgacagcatggactccgcttggtatggccacacgattcgtaactgggtggggcccaccattggcaacgcgaaggatacggcatgctaccggaagacggtgcctttcgacagcaagaacatttgtcctgtgggctacggcaagaatgatgacgactgtatcacacaatgtccgatggcgtacccagtctcgtgctttcttgagtgcatccctcagaacgacgactgcgcattgaacatcgctcagaaggttgcgtctgtagcggctgtcgcgttcaacgctgccacggccggattattcggccaggttaaggccgcatacactactgcgaagaagctgtacctctgcgctgcagccgtcatctccatcatcaagtcgctcattttctaccttcggttcacacaaacgactgcaccccaaggggacaccgagaaactgctcgccgtcgcgtaccagtccgacgtcgtcctcgtggatttaccggtggctgtgtactcgtgcctcggactgaaagtgcccccaaagttgcagtggacgggaattgtgctcatgatcgtggagaatatcgtcaagcaggccatcatcaacggcgacgtgatcgtttcgtcggccgagaatgtggtcaacatgctgaccaacactagcgccatcaaatcccccgactcgagcgtgagtgaactccaggacttcatggacaagaacacctcgtgtggctttgaattgaagcagctcacggaccgagtcatctttgccgtcagcgacgtccggaacaagacgccaaacgcagcaatcgatgacatccgcgtgacgatcagcaagtcgccggtggttctgaaggacatccctaccgtcaccaacaattgcatgaaagaaatgctgggcacgaagacgaaacaggctgcgtttgagacgcgcgacttgctccggaagaccgtgggggtgatcatcgaccagctcattgagactggcaagacggatatgggcgaatccgtgaaagaggacgattacttcatggaggtggccaacttggggcttactgtgcttggtggcatggacccgaccggtgtcgtgcacatggtctctcagttcgtgcaacccacatgcggacccacctctttcatcggcgagatcgacgacggcaacttgtatgatactttggggctgacgaccgtggaccaagctttcgtgggcagctacgggtggtggtcgaagactggagacggagtcgtgcgtctcatcttcgagagcacagacaaggaggacgtgacggtggtggtccactcgggtggtgacaactacgctgaagttgacgtagctgcaggcgacaccgtcacttgggagtcgactgtgtcggagttgcaggacaaaactttgtatctggatcgctggcgtcctggtttactcggaatgcccggatcgggtggaggttcgctgctgatttggatccctcgagcctctgaagggggcaatctgctgatgcacgtcagaattaatattagttaaatgtctgtcgtaaaaagaataaaaatacttgtgagcatggtatgtaccgtggtattgcgccttcaccttttggtctcttgaattctaagatctgctacgtgtccaaatctgaaaagtggatgcagatctgtaatgaactaaattaatctggcctttcttcctatgtctgagcatatattccccccccaatcaggagtttcaaaatagtgacatcaagatataaacgtttctaatagaaacgcatcactagccaatcatggcgaccaagtctccgctgctggcgtcgcacgaggccaacgtggcggtggccaaggacctgatcgatccagtgtcctccgtcgctgcattcggcgaggacgaccgatctatcgtggcgcaatgcgaactgcagcctggcgttgaattggtgacgctgcaaagaggagcgtttctaaatggcagttgctggctcgagcactacgacgccgaggacaaacccaagctgcaggagcagatcgactcgttgcagccgagcgacactgtgaagaccactttggtcctgctggcggagctcgcgcggggcgaagaaagtggatttcacggctacatccagcaacttccgacttccatttcgctgccgttcagctggggtgctgaaagccgagaaatgctccgacacaccacggcgcacctgattctggacgataaactggtgctcaagatgtacgcagactatgccgaaccattgatgaaggagttctcgacgatttggcccgctgaggtgtcgacgctggagaagtttcaatgggcgtactcgatggtgtcgtcgcggtaagatatggtgtcttcttactgttggtgattacttgagtattcgctaatgctggggttgttgttttgtttttcaagggctttcaaggttacggacggccaggagccgacgctgctgccggtgatcgacatggccaaccacgcggccgaaaacccagcagcgcacatcgtgaaaaccgagacgggaagcttccaggtgtgtgggtgaatgatcgcgtagacatctgcatggattctgacttttctgtggttgtcgggtagttgactacgttgcgcaaggttgagaaggatgagtctgttacgatttcgtacggagatctgtcgaacgcgcaggtgagttggtagttctgtgaagatgtccgtatttttctttgatccgctaactgctatggtgttatgctagctcttgtgccgctacggattcgtgctgccgacttctgtgccctcggattccatccacatcaccagctccgagctgactaacgcgttcaaggcgtgctcgctgaacagcgaagatgaggaagatgaagacgaaaacgatgacgacgcggacgatattcctcacgttggcaagggcaaaggcaagggcaaagctagagctaaggcaaaccctgccaagcgcaggaagttggcccaccctcaggacgaggacaactcgctattcttcttgctgcacggcgacgccgagcgagagttcggtcttggcgatgcgctgctgagtttcgtgatggcgtcccagttgcctgctgaacagctctacgacgtgctggccgtggttctgcaagacaaggataaacgctacagcgacgtgctgtcgacgtcttccgacaactccgaaatgattgctattcagcagctcagccagcacgaacgccaagtttgtcgccgcattctgctggagctgatgtcgctggaggaaggttcggactcaagcgacgacgaagagtaggcttcacctgctgagggacagaatacacgtttgatagcttgatctgtaactcgtgtcaatggctcgcttctcgacgagataattgacgactgtattccatcaattatttgtagtattttagcttacgttgacacgaacatgcatggttagatggccaccctgggacgatcttgggacccagagtaccagagaaccgccggctgatgacggaacgcccaccacagtcctgcgccagcgatccagatacagcaccttatcgtgcaaattcacgatcttgtcgctccagttcacagtcgtcccggcaggcacctcaacctttgcatactcttggccgccggagtggagaacgaccgtcacgtccttcgtgtcggtgctttcgaagaagaggttcatcatgtcatccccctccttcgtccacgtgccgtagctgcctttgaacgcctcgtccacagtcttgagccctagtgcgtcgtacagagtaccgtcgtcaacctcgccgatgaattccgtcgggccacaagtcggctgcacgaactgggagaccatccaagcaattcccgtcggatccatgcctccgagcacaaccagcgccatgttagctgcctccattgtgtagtcctgttccgcagtggactgccccaagtcggtcttgttcgtttccacgagctggtcgacgatcaccccgagcgtctttcggatcaagtcgcgcgtttcgaacgccgcctctctggtcttgttgcccagcagctcgcgcatgcaattgttggtagccgtggggatatctctcagcacgagcggtgacttactgatcttcacgcggatatcgttgacactggcgtctggtgttgcgttgcggatctctctaaccgaggtgatgacgtggtctgtgaggttcttgacctggtacccgcaggtggagttggagtcgaggaggtcttgcagctcttcgacggtggattcgtccgtcgagttattcaatgtgctggtgtttgtgagaagagcgaggacattcgtggcggaggagaggatctgatcgccgttgatgataacctgcttgacgatgttctccacgatgacgtacacgatgtcggcgaacttgactttgcccgacactttgatcccgagacagtttgccacggcaatgggcatggagaagatcacaacgtcagactggtaggcaacggcgagcatttcttgcactgttccttgcggcgccgtcgtctgctggaatcgaaggtagtagatcagagacttgatcacgccgatgatgttcgcagcgcagaggaaactctgcttggatttcttgtacgacgaaaagatggcgccaaagattccagccgtcaccgtgttgaacactgcagccaccacagacgccgccttgctcatgatctccccgttgcagtcgtcattctgcgggatgcactcctggtagcagtcgacgggatacgcaagcggacactgggccatgcagctgatcccgctgttgttgtagcctcgaggacacgctttggtgctgccgaaaggctccgtcttcctgtaacacgccgagtcactggcgtgtccgatcgtaggccccacccagttccgaatgcgatcgccgtaccaagcggagcccattctatcggtcagacgcttggtcttggcgttgatccgcgtccagatagcgcccacctggttgagttccccctcggctcgaccgaagaacccactgagctggaagccgtcgggggcagtcaccgtcgagttgttctcggtcggcgtacctgcagacaccgagtggcccttgttggtgccgaacttgaggtagaagatgcgcgagctcagccccttccgggcccaatgaacctccatggacttgacgtactcgccctccgccagagttagtgtgtggtctgtcccgcttgatccgccatgggaaagcgtcagctcggctggcgtcgccactcgcaggacgatcgacgtgacccgcttcttggcgctgatggtgatcgaactggcggtttggccaaactcaaccaactcgatgtccgagaacgagacgccgccggagcctccgaacgtgtcggaaagctggatgtcttcgtctgagggagaataacccccatggacgatagacaccaataggagcagcagcacctgcagcacagctaagggtggggccatgctttacagtgttactcggaaaatgtacgaccgaccgacccctcaggtctgcaaatgactttcatccagcgcggtcgccatcgcgacagtcggttcctcggttgggtgagctgtgaatctgtatgataagaaccaggatctgctctgctcctggacggtggcacaccgagacagctcggtcattctcgatcacgtgtcgcccatgataccaagatggggtgggggagaatctcccccacccgggagatgaaggcggcgaggaactaggcgccgacgtgtggcaagctgtgcggcgttgatttgagcgacttgcacgaagcgatcagagagaaatgtgttgccagtatgtagttgtcaagaaatagctctcgacctttcatgcctttggccactttctcattaatagatagctctcattctagggaaaccggcgatagtctcgggtctcgagacaacttcgaaatgccgaactgactcgcagcggaacaaaacgacctgctgcttgaagtggtgcttcagccctgattgcccgggagttcaaggaccccccgctgacaaacatcgcgcgattaacgcaaacggaatcctacgtggctgtccttgaagttccttccgccggtagtgtatgtacatgtgtacagtacagccgtaccacgcattccgtgaaagttttcatccgaaacttggaccaaggggctgtttttagtaaaactgcaagttgcagtctgcaaccaggacggttgcagttgcgcgagccgcaggtaacaaggcccgcggtcaaagcggtgacccggtcagcatcgctttgaagactgagagattgtcggagcagtcgagtcgaatgagagtctgcgacgccaggatgcatcggcaatgtaaggttacctggtcaaggtaatgtacgcgcaggctgtgatattactgtagcatcgcataataccagtattggatacgcaacaccctctacgaaacctcggacctgcagactgcaggtccaaagcgagcatcaagctcggagaccaaatgcttactgcatggcacggccacagtatcctcgattgcacttgttcgcttcgtgtcacctttcacgtttctggaggagcacggggttcacatctgcttagaagaccctgatactaaaattttcgcaaacagcagatatcaagataaagaagtatctcaaccataaaacacaccccaatgctataaccctcataaggaccacaaaacaatttaaacagacgcaatgcgccacgatttgctggtcccccatggcctttccaggttgccacttcgtctggtcctggccgtggagggggcacatgcaggggcacgccgcggttggacatcctagtagtgtcgttcgcggggcctggtccgtcggcctcaatacactgcaatgcaaccgcggtctcataattcaagtgcagcggtggccatgtcgccctcgctgctgctgcggacgttgacacttctgctgctctgcgtcgcccatggagccgccttctcgcacaaggacatccagctcagcgagacgttcggggagggcaccaagggcatcgcgttctcggacatcacgggggtcaagctgggtcaaaccttcagctccatcaccgttcgaggcgctgaacgcgtcgaccaagtgactctgagggtggcgtcgcccgatgaggagacgtggacgcacggaggctcgggcggggcggacaacatcctcatcctcgccccgcacgagtacatcacgtccatagaggctcatgtggccgagaagagcggacacaagcgggtcgtctacctgagactttgcaccagtgcaggcaactcggtcggtgccgggtccaagacgggcgagggcaggacggtggcggcccccgaggggttccacctcagcggcttcttcggtcgagcggggaccgaagtttacgagttaggtgctatttggacgcggatcaacgcgacgcacctgctgctcacggacgacatgggatcggaatggtacggcaagaagattaggaactgggtggggccgacaattggagatgcgacggactcggcctgctacaggaagacgcacgctctgagcagcaatggcctctgcccgctgggctacaacaagacggacagcaactgcatcgcgcagtgtccgctgtcgtaccccgtcaagtgcttcctcgagtgcatcccgcagaacgacgactgcatgctggaggtgctgcagaagacggcgtccgtcgtggcggtcatcttcaatacggccacggctggcctgcttgagcacatttcgacggcgtacaaggccgcaaagctgacgtacatgtgcgcggccaacatcgtcagcgtgatcaggtcgctcctgtacttcctccgcttccagcagaccaccgcgccccaaggatccgtcgaggagctgctgtccgtcgcctaccagagcgacgtcgtgctcgtggacttgcccatcgcagtgtgcacctgcctcgggttgcctgtatcaacggcagccagagccacggggattgtcattgcagtcgtggagaatatcgtcaagcaggcgatcatcaacggcgaccagatcttgtcgtcggcgaacgacgtcatgactttcctccacaatgtgagcgcgctcaactcgccggatgactcgacgattgtggatctacaagagttcatggagtccaatacgacctgcgggtaccagctcaagcggctcacggaccgcgtgagcaccgcagttgaaagtatccgcaatgcgaccctgggagccagcaacgcagacatccgggtgacaattagcaggtcgtcgctggtgctaaacgacgtccccgtcgtcacgaacaactgcatgggcgaagttctgggcaacaagaccaccgaggccgcgttccagacccgcgacttgcttcggaagaccatgggcgtgatcatcgatcagttaattgagaccaactcgacggatatgggcgccaacgtcgccaaggacgaaactacgctcgagtcagccaacctcggactcgttgtactggcgggtctggaccccacgggcattctttggatgatctcccagtttgtccagcccacgtgtgggccaacatcgttcatcggagagatcgacgacggcacgctgttcgacgctctggggcttacaacagtggacgaggcgttcgaagggagctacggtgcttggacgaaagagggcgacgggatggtcaacatcatcttcaccagcacagacacgaaagacgtgacggttgttatccattcgggcggcagtgactacgccaaggtgaaggtgccttcgtgcgagacggtggcatggaacgccaccgtggctgagctgcaagacaaaaccctgtacttggatcgatggcggccaaactttatcggaatccccggctcgggcggcggatcgctggtgctttgggtccccagatcatcaaccggtggccatttaaccctcaacgtccgaatcaacgcgagctgatttactcgcgttaccctagattaggctatgaaaaccttttacgctggctcacgtaggctcacgtgtatgtgtccagcgtacaagttgctgtaaagttaactcactcactatgcatgtttgttaccgatccgtgaatctggatcgataagctttctgtcatgatacgatttcagaatttccaatgttagtgaaaccacactcttgttttgatgaagcttgccaagcgattcgtatcgcatgatgacatcgtacagccagtcttcggcgcgcagacttcgcacaaaacacacgagcgcgtggtgctgcaccacgcgctggtgctgtaggcatccttcatatgggtcattccagtccgatttttctcgagaatctgtctcggtgacgactgctatcacgtcgccgcacgggacctcactgaatcggacagctcgacgcggtcttggagctcgaaacacattttatactctcacctgaggactcctcagtgaggagccgacggcctcggtcaccgaggccctcggctccgagtcggtccgaggcgcgtgtgccaatcccatttgctatcatgaggagcagatcaggtgcgactaccgcattttcatgtccatccggaagactggaaggcgaggccgggctgacgaccccattcggcgttttgcactctacggggctcttgtgtctgcccccgcagactctgggcggcaaccacgtagaacccggcgatgccgcgccttgcggtgctgcaggcgctggtgatccttctcgtcgtggcttggtacggagccgagggcgctgctaagaagaagacagatgtcgcgacgacagacgaagacattgtgctcagcgaggtctacggcggtccccatggctacgcgttctcggacatgtcttcaatcacgctcggacagacgctcagctccgtcaccgtgcgtggtgcggctcgaatcgatgccatttcggcgcaggcggcgaagccttctggctccaattgggaccacggaggttcgggcgggaaggagtacgtcctcacgctcggcagcggcgagtacatcaactcgatggagatccattgggccaagaaggggacgcacacgcgcgtgttttacctcaagttcgtctcgaacaagggcaactccgtgtcggcaggaaccaagacagctaacagcgcaacggtgaaggcccctaaagggtttcaattggggggattctacggacgtgcagcgtctgcagtggatcaactcggtgcgatctggacgagaaggggagcgaaacccgctctgctcacggatcggatggggactggctggtacggcaagaggatccgaaactgggtgggccccaccatcggctcgaacagcgacacggcctgctaccgacaaacggagccttataacagcagcaaactgtgccccgcaggctacacccctcttggcgatagctgcatcgctcaatgtccgttggcgtaccccgtcaagtgctacctcgagtgcattccacagaatgacgactgcgctctggagatcatacaaaagagcgtggcggtggtggccgcagtgtttaacgtggcgacggcagggatcttcggcgccatcttctccacgtacaagcatgccaggcggtacttcttctgtggcgcgaacgtcgtcggagtgatcaggtctctcgtttactacatcagattccagcaaaccacggcaccgcaaggagcagtggaagagattctggctgtggcgtatcagtcggatgtcgtcgctgtggacttgcccgttgcaatctgccactgtcttggaattcatgttccgcccactctgcagttcaccggtatcgtgatgatgatcgtggagaatatcgtgaagcaagtgatcatcaacggcgacgaaatcctctcgtcaggtcagaacgtgtacaaactcctgagcaacgtgagcgcggtcaattcttcccatacaagtgtggacgagttgcaggatctcatggacaccaagtcgacgtgtggctaccaactcaagcgccttacggaccatgtcatcctctccgtcaacaatatccgcaacacgaccccacgagccaagatcgacgacatccgagtgcagatcagcaactcgcgcctcgttcagaaggatatccccgcagctaccaacaattgtatgaacgagctgctttcctataagaccaagcaggccgcgttcgagacgagagatttgcttcggaagacgtttggagtcatcatcgagcagctcatcaccacggcaacaaccaacatgggcaagtttgtcgcgatggagcagtactttattgaggtgtcgaacctgggattaaccatgctagccggtctggatccgactcggatcatttggttggcctcgcaattcatccagccgacttgcggccccacttcttttatcggggagatcgacgatgggtcgttgtacgacgcgttgggtctcaaaactgtggacgaggcgttcgtaggcagctacggcgcgtggaagaagaaaggggacgggatggttaacatcattttcaagagtatcgacacgaaggacgtgacagttctcattcactcgggcggcgacaagatcgccgaggttgacgtgaatgcaggcaagacggtggcatggaactccaccgtcgccaaactgcaggacaacgtgctgtatctggatcggtggaggccgaatattatcgggttgaaaggctcgggtggtggttcgctcaagttgtgggtgcccagatcctccaagggcggccacttgacgatgcacgtgatgattaatgtaagttagagctctcgtcgtttttaaaaagtgtggcaatagaacaattctagatcgtgaaaactaaccgaacgactcatcccttctgtacagcaccaacaacatcagcttggttgagaaacccacgcaactccaccaagtgaagtcacgatagataaaacctctcctgcagtacatgtacatatagtcagtatactcgagggtattgcagcagttccttgaacaagaccttgaacctcgaagtttcacacgaagtgcgatgtctcgctcgtttcaaacgagtcgtttgacgtgtcggggatcgccttacagatcccgtggcctatcttgcgattttttctggtcgtagacccgcgattggtgacaagatcgatgacctcgcgttctcggacatcaactccgtcgtgtttggccagacagccagctccatcacgattcgctctggtgaccgcgtcgatgcggtgactttgcaggttgcaacccctgctgcgttgacgctgtcacacggcggatcgggtggaaaggataatacgctcgtgctcgaggacggcgagtacatcacgtcaatggagatccactgggccaagaagcttacgagctccagggtcttttacctcagcttcggcaccagcgacggcaattccgtttcgggagggaccccgaccgaaaacaactcgagtgtttccgcccccgaaggtttccagctgagcgggttcttcggccgtactgaaggtgccgtggatcaacttggtgtcatctggacgcggatcgatgccaagacagcagtgctcaccgatccgactggtacggagacaggatccggaattgggtgggccctaccataggcgtggctagtgactctgcttgttaccggaagaccgagtctgtcgacagcaagaaagtgtgtccgctgggctacgtgaaggacagcatcacgcagtgccccatgtcgtatccggtggtgtgctatctcgagtgcattcctcagaacgacgactgctctctggaaatcttcaccaaggctgcgtccgtggcggctgcagcgttcaacacggcgacgtccggcgtcttcgacgctctcttcgcccaaaacaagagcgccaagaaggccttcgtctgcgcctcgaacatcgtcggcgtcctcaagtcgctcatcttctacctgcgatacactcaaaccacggcaccagagggggacgtggaggagctgcttgccgtggcctaccagtcggacgtggtgctcttcgacttgcccgttgcagtgtgcaattgcctcggtattccagttccagcaggcgtaaagttcgcagacgctgtactggtgatctggtgatcgtggagactattgtgaagcaggccatcaccaacggcgaccagatcctctcgtccgcggccaatgtattagctctcctcaccaagacaagcgcgacgaattccactgcagacacgagcgtggacgagctgcaggacctcatcgactccaactcgacctgcgggtaccagctcaagaacctcacggaccacgtgatctcgtcggtgaacgacatccgaagcgcgacgcccaacgccgctgccaatgacattcgcgtcgccatcggcagctcgccgatcgtgttcaacgacatccccacagccaccaacaactgcatgggcgagcttctggccaccaaaacgtccgaggcggcgttcaagacgcgcgacttgctgcgcaaaaccttcggcgtcatcatcgaccagctcatcgagaccacgatcaccgacttgggggcgtccgtcaaagagagcgactacatgctcgaggtggccaacatggggctcgtggtactaggcggccttgacccgacgggcatcgcctacatggcttcgcagttcgtgcagcccacgtgcggccccaccttggatctcgccgcgctactcactgcgccaccgaaacagaagtcgacgaggcagcgctggattccgagtccgcccttgacagccacgtcggacctggaccagcattgatacagatccgcgttgaagtcgcccgtgacgctgcccacttgcaatcggacgttgaggtgccacgccggccagttccacgcgcacggctggctgctgcagcggcgtcggcctcgatcctcgaggatgaacgccatcctggcagcctgctcgctcgctgcagacggcagtgcagtagaccagctcgtgcaggagcagcaaagcaaaggtgctgccccgaaaccgtcgcggacacacaccacgcgcacgccagcgtcgcacatggctggatggcgagcggagcgcgcgtcaccaagcaaggccgacaggctcgtgcgcagctcgaggcagcgctgcgcttgactccggaccaagaggagtcagagatcgacttcaacttggctcgaaagtatccggacgagagtcagcgcgcgccttgaagctccacgatggcagcgtaggtaatgctggccatcttgtggtgcttggggctcgcgaaatgctggcgggttgccagctggatgggcaggcgatgcccatgcgagtgcgcgctgcttttctgcagccagtgagctgtgcaaacaacgcggcgagggcgaacatatcttcacggcgagcgggctttgacgcatgagcgagttgcttcgccgcgtcgtgtggtcccccctatcgctttacacgacgcaacggttcggcgtttcttttagaggtgcaaccgttctgatggttcgaaaaacagctgcccctagcccctgcatcgaatttcggccattgcctggggagctacgctaccgtatttcagtactacagtactgggtgatctcgaaaaagcagtggtcctgaacgttgaatccactcgcagagttgccacactgacctaggtttaccgactccatcacttgcctttttgtgctgcctgcagtttcccacgctttagaatgtatagtgctgctggcgcagccaagtgtttcagcaatggatcatttcgaaggggaggagggttgcagatgtaatggcgctgcagttttcacaagcatgcacgtattcgttgccctatcagtggcaatatcctcccgtgaagtagctaaggatgggcataatgatcgacttaagcactgtcggcatatagtagctggcacacatcgctgtttcgaggacatgcacaacaatcgcatcccgcctcgcttcgcggcaacaacccacccacctagcccagggcagcaatagcagcctgatcactttcgatcgatacgtgcctccttgaggagtacagtagctggctgacatcaccactcgcaacccactccagtcaaaatccaccacgttaaacgcgaagctcgtcttcaaccccaacgtactgattcacgttcgaaacctcctcccttgcctcctactcacctccccattggccgaaagtcctcggtgacgacccgcggccagccacaacacgacactcgcctcttgccccgacgcctatcacttcgcgttgttccgcgcaagaggcagcacattcactctctcatgacgttctcgggcgtcgccggagcagccgcgcgccagcccaaggcgctgctggcgtcgggcgccgcggcctccgacatcaaggccgaggccgtctcggccgtgcagctgcgcgtgggcgacctctactggaagcaggacggcgcgttcggctggacgctcggccaggtctcggccttcgaccgcaagcagcagcgcgccaccttctgcctcatcgacgaggccaccggcgagcagctgcgccgcagcgacgacgatactggcggtgagcgcgccgacctggagctcgagcagcagatcgacctgcagcagacgccgctcttcgccgccaaccccttgttcaggtgcgctacttctctaaccgtgttgcctcggttaacactagcctaaccttgtcgttcattgccttaaattgctatggtaactatctagcacggcgtcggatatgacgtcgctgcgccacctgcacgaggcggcgctggccaagaacttggaggaccgcgcggcgctgcagaaccagcggccgtacacgttcatggccaacgtgctgatcgccgtgaacccgctgcggcagcttcccgagcccgacaagatgctgttcgtggggcagccgctggaccgctgcccgccgcacccgtacaacgtggctgagagcgcctaccgccagctctgcgccgtgcgcgccgtcatgcagaaccagagcatcatcatcagcggagagagcggctccggcaagacggagacgtccaagatcatcctcgacttcctcaccatgcgcgcggtgcacaacccggcgctgtcgtcggcctcggcctcgtgcacatccgacgacgagatggaaccggagctcacggcccacaatcgccccgtgctgggctgcatgggccctccgggctcctcgacgctcgccatgtcgtacccgcagtccagcggcaagaggaagctctcgcctgtggctgtgggcgagcgactcatggagacgatcccgatcctcgagtccttcggcaatgccaagacccaccgcaaccacaactcgagtcgcttcggcaagtacatgaggctgcagttcgccaacgagacgcacgagctctcgggtgcgagtatcgacacatatctcctggagaagagccgactggtgttccagccccagggcgagcgcaacttccacgtattctacgagctgctgcactcggacgacaccgagtatctggagaacgccctccacttgaagcccaagaagcccgaggactactcgtacctgaaccagtcgggctgcatgcgctccgacctcattgatgacgctgagaacttccgaaacttgaagagcgcgctacagttcattggcatccgagagagcgctcagcacgagattttccgccttgtggcaggactgctgcacatgggcaacatccacatcagccaagaggacacggaggagggagaaacagcctgcatccgtgaggacgatgaggcatcgcaggaggctgtgcgtcacgcatcggagctgcttggagtctcgaaggagcagctcacggaaagtattctgctgaagcggatcatgacgcgtggctcccgacgcaactccatctactttatcaagcgggacgttcgtaacgctgtgtactcgcgtgacacaattgccaagacgatctacgagaacaccttcacgtggcttatgtgggagtgcgctgcggctttggactacgactcgttccgcagtgacgtggtgccttacatcggtgtcctggatatcttcggtttcgaggattttgagcccaagaaccgcaactcgttcgagcagctgctcatcaactacgccaacgagacgctgcagagtctctttaacgcctgcatcttcgaggcggagcaggagctgtacaagagcgagcacatctaccaccccactaaccactcgctttcgttcccgttccccctggccggccagcccttgaagctgaaggacccggacaacgagatcgactttttggcagagcaggtggctcccagtggtgacctcgtggcctactcagacaaccgcgagtgtttgaacctcattgctagtcgccacggtggcctgttcgctaccatcgacaacgtgtcgcggcttccgatgccgtcggaccgtaagctgaacgagcgcctgcacactctgttcaagcgccacccgtgcttcccgacgccccacccgaaggatattcgcgacactttcctcatccgtcactacgccggcactgtatcgtacacgattgactcgttcgtcgacaagaacaacaacattatctcggaccagttcgaggagttactcaagaactcgtcgtcgcgtgtgctgcaagatttgaccggcaacagccgtaatggcaaccgtgcacgctcagcctcgaacgtatcgaccaagtcggctggactctcaccgctgggtggcggctcggcgtcttcgaagcgcctcaagggaggtagtacgtccaacctcttctccacgcagatgaagggactcacgacggagctggagggtacaagctgcaacttcgtgcgctgcatcaagcccaacactcagatgaaggtcggccatttcgatcgccctttcgtcgtcgagcagctccgatgctcgggtactgtgcaggcctgcgaggtgctccgtgtcggccttccgactcgaattctgtacgcggaagtggttgacgtctaccgcaatctgctgccgtacgaagtgttccgtcgctttgactcgaacgacaagctcttcacgcaagctattctttgggcttacgacttccctacgggcgcctaccgcctgggtgacactcgtctgttcttccgcacgggcaagattgatctactcgacaagctgctcacaccggctccggcatcgaccgaaaacctgggtaagcagctgctgctctacctgcgcaagaagcactggattagcgtcactacggctgtgattaccttcaacgcgttcaagcgcattttccaggatgttcggtacaaccgacgtgctacgatgattcagtgcatggtgcgtcagcacctggcccggaagcgtgtgcggaagattcgcgtgcagctccgtatgcacaagctctggactcggatgtcgcaccaggcgcagatcatgcacgcgtaccaggaccgacccgaggacaagatggtgcttctcgacaagttgcttgccaagaactacctcccggtgcagcagcgctggctgctcaagtggctgggacccttgcagcgcgttatctacttgcagaagcgctggaagaagatcacggcgcagtatatggccaagcgtggattcttgtggcttttcgagaccgtgcggcggaagcgaagtgcgctgcgtgttcaggcgcatgttcgcgcgatgatcgcgagaacccgattcctcaatctcaagaagaaggccctggctcgtcaccgttggcgagctgcctacctgaaggtgaaggtgttcggcctgttcaaccgccagctgcggctgatccacgttgaccgtctcgagaaggacaatgcaactttgatgaacagcatggcagctgtgaccgacaagctaagcgaggctcaagaggaggccaagatggcgaagctgcagctcaagaagctccaggtatcgttcgacgaagtgaagatcgaagccaaacagcagcaacaacgtgtggaggaactggagctggctttgcaggccagaaggttcgaggtcgcagagttgcggcggcagacgacctatggtggcggcttggtggagcgcatcattcgcttcttcacctgcagtgccgccatctccccgccgtcgtcgcctcgaggcatggtcaccccctctcgcttgcccactttgagacgacagacgcagtcggcgtcggaggagacctctgacaaaggcgagcgtatcgtgtgggcgaccccgttgagcgaggccgtcatgatcccgcaggaggaggacggcggtgcagccaagcggcgcatcagcgtcactgcggtgagcgaggagcctgcgttcgactcggaggaggaggaattccgctccaaggacgccgacatgctgtggtctgtgtccaggtacatgttctaaggtccaagtgttgattgactttcgtggagttgctcgcggcatgaagcctgcgcctcccctcgacgccccagtccaagactcgcgtcgacttatattattcgcgtagcgcacgcgctggccgctgtatggcagctttatatattgtaaactaaggtgtgtgagtttgccaggtgtagcgtacgtcttggtagcctaacctgtagcgtacatgtgtagcacggggccgtcggaagttcctgcgttcgtggcagatagcaaccttaattgatgcacttgtgtcattgtatatctcgtggtagctgcagtcgtgtctttggtggcaaaaccgccttgcttgtcactggttgcagggatcactagcgacaagctagcggttttgctggcacgaagttattgcgcgagcagcgtgcgtcatgcaacgaagtagccaagcgatctttgaagcaagcgatccatgaagcaattgtcaagcgcccggccacgttgatgttgccttttggtgaccatcgcgcctccacgttcccgtaactgcgcggcaactatctgcgtgagcttcctacgtcactcggaacttcaaatcgctacgaagtatcatacgagtgatactcacgcggatgttattatctaggcttaccgcctgaattctgcctacaatgtggcgtacacggcttgctcgatcagcattcgagctgtgtcgttgctcggctgcacttccagtagctgcacagcggcgcggtgcgccaagctccatcgctggagcctcgtggcgcacgttcctagtccgacgagagcttcgataagctgcggcttcaacttgatggcagtctcgtagtgacccagagctttcccgaagttgcctacacacggacagaatacagatttgacgactcagcacgagcatttatcctgtcataatataataaaaacataccgctttggtactcgaccatggcgagcttgttccaggcgtaggcatactcggggaagtcgtgcaccacttgctccagcatctctcgcgcttcgtcccacttcttctgtccggccagctccacagctcgctgcacttcatcctggacactctgtccgcactctccgagccacatgccctccagactagccatcacaaactggacgatggtgctgtcgtcacagcgcaagtacgtcagcagcttgtcctcgtccgccgattgaagttgcatgatggacggcgtggacacaacaacgtcggcgtcttcaggttttccagagacgtcagtcgggtaccgagctgccagcgcttcagacgcgacgtggtgagtgccatcaaagccgtcaaagtacaacaagagcgcagggtgcacaaccgcctgcaacagcaacaaaacaagtgttagaggagtgttgcagaaggtttgatgaagtgatgaaaacaatattttcactaccttgggagattcatccagacggatttcttcttggggcacgttgtacaatttactcgcaaaactgtaaattggtaaccaaatcagcacctggacaaccccaactagaggtattataaaataaaagcccacccacctgaagccaggactgtgtggcaaaatatcatacacaactcgcggccccgctgccgcttcaaccccgtctgtggttacataccaggcgaaaatcacaccacgcttttcacccttcacttccaccacgtctcccaccaagaactcgatggcgttgctgcgttcctacacacaaaaatccaagccaaaggttaggtgcatgcttctgcaaattctctctaactttatatcacccacccaccttgggtccaaaaatcccttggtctctaaactcccggatgagggcgttgtggtcgtccacgctcttcatcgcgtcaaatgcggcgtcaatccgggcgtccagcgccgccttatcctttgtatccacgggctgggcgaaccctgagcgcacaatggcggcaaaagttttgttgcctgcgccccgtcgctttaacacctccatatcctcgaagcgccgcatgaacatgcgctcgcgctgccagtcgctcttgaccccggcgtatgaggcgacggcgcccgagcggacggcattgtacagggtgcggccggcctccacgtcgcgctgcagcgtctgcgtggagcgcagcagtgtcctggggcagcagatccacaatattaattcagagattcccttaacccacgctggtgccgtggcaacacgcaccgatagagcgcgatcaccaccggggacgccatggcaacaccaggatggcaaaatggcaaaacaaacctcacatataaattccatccaccaatcaaatccgttagtacaaaatataaccgaaatgcgctcgtcccattggtcagatacatattttagccgcaagatacaccccatcaaagtcacttccactttttttgagaaagctttaggtggtgttaaccatggcgcaggcgctggagggcttcgacgtggaggcgtacgccgccaagtacagcggccgcaaccgcaccgagcggctgctgttcctcaccaagacgtgccccgagctgcaggccgaggcgaagcgcgcgttgctgcgcgagctcaagggcagcctgaacatgggactgtacgccgagattttaggtgaaaaggtccaggaggaggcgagtttcatcgacaacgtgaaacacaacgcggcgcagcaacacgagcgtctggagcaggagttgaactcgtacaagtccacgatgatcaaggagagcatccgggtaaagtgaaaaaaaagagcttaggctagtgctaacctgtttaggctagtgctaacctgtttaggctagtgttaacctgcacttatagataggttactaactttcgttttatttgcttagatgggccacaacgacctgggggatttttactacgaaatgggtgatttgccagctgctctcaagagtttcgcccaggcccgcgactactgcaccacggacaagcacattattgaaatgtgcctaaacgtgagcaaagtggcgctgcacatgcgcaacttcggccacgtgaccaactacctgaccaagctggagcaagtcaacgcgcctcagagcgacccaatgtaagtgcaaaaagtgatcctgcaattgcaattgcaactgggtgttgcagtggaataggttaacactattttttacttttatattttgcagcttgaagtcaaagatcgcatcggcttttggacttgtggcgctgaacgagaaaagttaccacgcggccgcctccaagttcatcgagtgcagcgccgagatcggttcgagttacaatgaggttctgcacgcagaggacatcgctctatacggcggaatttgcgcgctggcgtctttcaagcgtgaagagctcaaggaaaaggtggaaaactaatctcttgggccaatcgtgtgcgtgttgaagctgatttgtttttgctgcttttaggtgatcaacaattcgtcgttcaaggcgtttttggagttgctgccgtggctgcgtgagctcatcaccgacttttactccagcaactacgcgtcgtgcctgcagacgctggagaagatgaaggtatgctgccggtgtacgatgttactgttacggtcggtatggcattgacattatttgtaaaaaaaatggttttgttgacagcctgagctcaagctggacttgtacctgtgtgagcacatggagaagctgtgcaaggagatccgcagtcgtgggatcatccagtacttctacccgtacctgtcggtggatctgcaccaaatggcgcgcacgtttaacacgccgacaccagaccttgagaaggaaatctgcgagctcattgcggccgagcgcttgcacgcgcgaatggattcgtatcagaaggttggtggttcctccgcgttgtcaaaagttactgcccattctaatagctacggggtattgtcaattttcaggtgctgtatgcttatcacccgaaccagcgcgcggccacgtacgagcgcgcattcgaagtgggccgcaagtacgcggccgagtcgcgcaacctgctgctgcgcatgagtctgctcaagaacaacgttattatccgcgactcgtaaaccagcatcgtcgcgacggcaactggaggttttctaacccagtcagtgtttgcgtgaactgactgaaacctatcaggtaatttgacaatcgtacgtgacttcgctacctgctttcacgaatcctggtgcttgtttgtttgcaatcacgggctcaaaaatagccaagaaccgcagtttcactgtgtctgttttgggggctaccgattgcatcggcgttcaatttcgtaggccttttcacattaacttcagcatgggtgacgcggtggaaggaactacagcaacctcgacagacagcactagcgagcagcagcctctgtcaatagctgaatcgctgagtcacgtgcaagatggactaaacgtgcacaacagtgcatcgcgtgcaattttgctgcacatctgccaacgcctcacacggctggaagcgagcatggatgaagcgcgtggggacatctaccagctacgatacgagactaaccaaggatcggaaactgttcgaggcgaagtttcgggggtgcacgacagggtcaacaccataactaccaagctaaaagagtaccagaacgtgatggaggtcttccagaacgacattcgctcgcacaagaacagcatctcggtgctgacgtccaaggtcaagaaggaaaaggagcacatcaaagtcgtcgatacggtgcgtaaatctctcgagtgatggagataccagggtgttttgctaacaacaaatcttttgctttaccttggcagaaagttgagaatcaccgcaatgacttcaacaatcgtttcacagagctgacacaaaagttccaggagcttccgcttcaactcgcagcgttgcagcccacaccccctcccagccacatacccgagaagttcaccttccagaccaacgacgagaaactatcactccagacacacctaaagcgtcttgacggcacgaaacgtgcccagggttacacggatctgcagcctttcactatccccgaggacatgaagtccaaggtagagacgcgaatccggcagcaagaggcgagcaagcgcgaggccgacgctcgagctgccgctgagctgtcggatgcgtatcgacggctgcaacttgctgcagtcaacagcaacaaccctcgactcagtgaaatccacctgacgttggatcgatgccagcaagaagtgaagcgcgcgttccagctgatccgcacgtccaacctgcagctgtactcgtactgcgaatccaaggtagaacggatggagattacggcgctacagaacgagatcaagcagcttcggactcgtatgcgcgagatcgagagtcaccctcgacaaaagcagctccagctccagcttggtggcgagactacaggagccctatcggatggacttgtagtcggggacaagcctgccgcatccagcgtgaagaggacagcgcaccacttgaccagctcgcaaatccccgttctgcgcgtctcgctgctggaattgtcaaggaatttgaatctgctgaagcaccggtggaagaagcacaagcgactcaaccccaacagcggcactaacgtgaatcccgtcgcgcagaagcatctcgacaagctggtggagttgatcaacgacgcatacgcctccatggcgcaggagccgatcgatcttgcagcggctgaggctcatgtggagaaagtcggtcgcgtgttgggatcggacttctcgatgcaaatcttggcgctgcttgggggacgcagcgatgaaccggagagctgtcgattccctgtggcaatcactgcacgagcggcagcaggtgagatggctgcagcgttgtgcaagtactcggaagcgttcaccgacatgttcttccggcacgagaccgacaacaaggtggcaactgcagcgatgaacgaatgggcctctgaaaagcgtaccgtggagaatatcggccgggaagtgagctccctcgctcgcagtcagcatgtgcttgaggtgacactggcaagactcgccgctgcgatgcagaggaagaacttggtgagtgtggacggagacggaatgatcagtaacgagagcgaagcggatgctttccagtcctggacaacgatgggggacgagttgcaacagctaaagggacagatcgaggcgatgagcagacactttgtgactgaaagtgcacttgcggagatactgcgagaccttaaacagaacacaccaccgttcacaggcgtcagtggggttacgatcggccagagatatcaagcagtaacatcgccagtaggatccccgccatcgtcggcctccctcttgaagcgcccgccgaccgtcgaaagcgactcatctgcgaacaaaatgctcgcagcaatcacgctggaaccgccggaagaccgaccgaggtcccagacgaagctcgacccgctgcatggagtcaaactcaacgggtctagtcgccaatctggcagagcggatacacaagacagtctgggctcaggacaagggtcagcaacaagtagaattcaggctcgagcacaaatgctgcgaccaaagagcatgcagcgcccgaactaagtacacaatggtacaaacccttttgttttgtcaccaccgcctccatcgtgttctattacaagcaagtctccgaagctcagcaatccgtgagcctagcgattcaatataaaaatcagtttctccattcctccgtcaaccttcgctccccttctcaaggcagcggttcggatgcgtcacccacacgcttgaggtgcaagtacgcatcggtcccgtacccctccatggagatgacctgcaagtcccctccaaagtagcgcgcaaacagtcgactaatgggcaaaccatagcccagtcccgccaacggcgaatccccgccgaagtcattgggcgcctccagcctttcgaacgcttccgagtccgcggtcgtgtacagatacgaccagatcctcgatacggacgagcgggggataccccctccctcatccgaaatcttgatggacacgtcttcgttgtcctctccgtcggcgatcacgatcttgatggggggcatgtcgttgtccacgccgtggaactccaccaccgcgcgcatcgagttcttgatcatctcaaagagcatgtggtgcaggtggctgggcacgaagggcatggagaagtccgtgtgtccatgcagctcgacctcgggggcgtctccgtactgccgcagacacatgtgtctggctgtatcaatggcggcgagggcgatctcggcgggggacgtgctctcgcagatgcagcccacccagccttcctcctcgtcgtgcagggcgatgtgctgactcatgagcatgcggatgccgatgcgcgacatgtagaacgcgtccaggaaggaatgcaggtccgacaggtcggcgaactcctgcgagcggagatatctctgccccacctccttgccgcccttgtccttctgcgagaaggttttaaacagctccatcttgagctcgtgcacgcccttggccatggtgtagagcgtgccgctgtgccgcatcttgatgctctcgatgagcgaccggaaggccagctcgtcctggaagctctcgaccttggggaagctgagcagctccttggccgagtccacgtaccacgcgcgcacctgctgcaccgacggcatgtcgctgagcccgtgcggcaggttctccaggttcttgatgcggtgcgcgtaccgcaccggcagctcgccgtgcaggaagcgcgccgactggatgagcttctgcggcgagatggccgtgccgaactcgagcaggtactgcagcgacacgcccgtctgcggcaggcgcgccagctcctcgatcttggccgccatgttggcgtcgcgcgcggcgctcagccccgaggccgcgcggcggagcggagcgacacctcgacgcattgatccgacagagccggtagacggtagacttgccggcagacttgggatcgctgacgcaagtgtgggaatgatgcgagttgacgtgaaagacgtgaaaaatcgtgagagatgatactggtgtggttgacatcagtgctgtatatgggcggttgtatgtggtcattagattatagaggcttcgataggttttgcgttttttttcttgtggtgctgcggtaacttcagctctgaaggcaacatgtgtgcaggtggtgtggaggggcagctgtggactcggctcaaactgcatggtgtggacgctgtgggagcgaatttgaacgcacctttactttttttcatacacgaatacagctacaactatcgacttaggacggattgatccgtacgtgcatcgtgatatgcccgccttccgacgaccgcgggatccacatgagcaacgagccacctcccttaccaggcagacccaaaaaaccgggacgccagcgatccagatacaaagtcttgtcctccagctccgggaacgtggcttcccacgtcacggtatcccccgaaccaacgtccaccttggtgtatccatcaccaccactgtggacaaccaccgtcacgtccttcgtatccacactctcgaagattaacctcacaacgccgtcacccgcgtgagtgtacgacccgtagctgccggcaaaagcttcgtccactgttgagagccccaatgcgtcgaacaatgtaccgtcatcgatctctccgacgtaagctgtaggcccgcatataggctgcacgaactgcgaggccatgtacgcgatacccgtggggtctatcgtggacagtacgaccagccccatatttgccacttgcagcatgtagtccttctcggccacgtccttccccttatccgtcttaccagtgtcgatgagctggtcgacgatcactccgaacgtcttccgtagcagatcacgcgtctggtaggctaccgtcttggtcttggtggccagcagctcgcccatacagttgttcgtgacgatcgggatgtcgttcagtacgatggacgacctgtataccttgacgcgaatgtcgtcgatgttagagcttgcgttacggtacctaagcacagccatagtcacgcgatccgtgagacgcttgagctgccacccacagctcgagttcttgtcgatgaggtcttgcagttcgtccaccgtcgtcgaagatttgttcaccatgttgttccccgtcagcaagttcatgacgtttgctccgctggagatgatctcttcgccgttggtgatcgcttgcttcacgataccttccacgatgacaagcacaatgtccgcgaactgcgctttagccggaaccgggataccaagacacgtacaaacagctacaggaaggtcatacagaacaacgtcggcctgataagcgacggtcagcagctctgccgtgtcaccttggggtgcagtggtttgccggtagcgcaggtaatagatcagacctcggatcacctgcacgatgttcgcaacgcaggtgatggcccacttgacagttttgtaagcagccaaaatctcaccgaatactcccccagttgcagcattcaacgccactgcgataacggtgccgattttgtggagcaccgcgagagcgcagtcgtcgttttgagggagacactctaagccacacgtcacaggatacgagatcggacattgcgtgatgcaatcgtcgccgtccttgccgaagcccaacggacaaatgttggtgctgtcgaaggccgccgtcttgcgatagcacgctgtgtcggtaggcttgccgatggtggggcccacccagttgcggatcgtcgtgccgtacgaattgttgccgacaccggaaggatccgtcagctcgatgttcttggccgacattctcgtccaaatggccccaagttgatccacttcatccgcagcgcggccgtaaaacccactcagcatgaatccttcaggtgcggtggcaacccccgttttgtccgtcttcgttccgccggagatggtcttgcccttgttggtagtgaagctgaggtagaacacacgagtgtgagacccctgcttctccgtgtgagcttccatcgaggttatgtactcgccggaggcaagagtgagcgtctgctcctctccgcccttaccaccgtgagagaacgtcagttctttaggggcagcgacctgcagcgtcacagcatccacgcgctttgccgaccgaatcgtgatagaagacgccgtctgaccgaatttgatgtcgttgatgtcggaaaatgcgttgccgtgaggaccgccgaatagttcgctcagcacaatatcctcgtcagctgaaacaggaggcgcgaccgtctcgttgaccgctgcgatgctggaccatacggcaccgaccaggtccatctcgtcaccgtagcgaccgaagaagccggcaagctggtagcccttgggtgccgtcgccgatcccttctcatcagtctgcgatccgcccgcgaccgatctgcctttactagttcccaaattcatgtagaagatgcgggtatgaccgcccttttggccccaatgaacctccatagtagtgatatactcgcctggctcaagcgtaagagtgttgtcttctcctcctgtgccgccgtgggtgaacgtcatctccttcggcgccgaaatctgcactgtaaggccgtcaagacgctcggcggcacggattgtgacggaactgacggtcatgccggaagtaacagcgagctggtcggagaactgctcgccgtgagggcctccgaacgaatcactcagttgaaccgcccttttgttcaccttcgtcttcacttccgacaaactgccggcgatgtcggcaggggcgacggtacccggggagtcctcatccttgactggggcaggtgccggtgtcggagctggggtcaccaagtcaatgtacgcccaaactgcacccagcgagtcgatttccttgccgtctttgccgaaaaaaccggccagctgaaagccttcgggtgccgtcacggtgctcttctcatccgtcatggagccaccggctagcgagttgccggcgctcgtaacgaagttgacgtagaagatgcgcgtgtggccgttcttcttgccccaatgaacttccatcgacttaatgtactcgcccttttccagcttgagcgtcttctgatctcctccagtcccgccgtgggtgaacgtcagactcttaggtgccgaaatcgtcatagtgataccatcgagacgctcaccggcatgaatcgagatggagctgacagtctgacccgaattcacgaagtttttgtcggagaagtccataccatgaggtccaccaaagctctcactgagctgaacagagtccttgacggatattgacggttctgcaggtgcttcagtgccggcaggtgccggcgctggaccagccgtggctgatccggacggtgctggtgcctctgcaacggatcctgcagcagaaccttcagaagatgacagcggctctgcagactctgatgctgatgactctgtggatgctgcagccgactcatcggtcgacgatgtcgctgctgaggcgtccgcggatccttcccctgaagccgcctccgacgttgctgctgactcatccgccgaatcgctcgtcgatgctgctggtctttttcctgttttcttgggctttgccggttccgcaggctctgacgcggaggaatcggccgacgctgctgccgattcgtcatctgaagcgtccgtcgacgttgtcggccttttccccgccttcttgggcttagccacagcaccggtagatcctgacgcggaggcatcggccgaccccgccgcagactcatcggctgacgcatccgtcgacgtcgctggagttttacctgctttattgggcttcgccacttcagcagaccccgaggcatcgatggaggcttctgcagacgcaggagcagtcgcatcggtagatcccgcagtggaatccacagctgaaccttcaccagaaccagcggtagaagctgctggtgcaggagcggcagcggcgggggccggtggctccgtcgccggggcttcggctgaaatacgcgtccagatcgctcccaacttgtcgatctcgtctccgtcttggccgaagaagcctccaagctgaaacccctcgggcgccgtcaccgtgttcttgctctcggtctgcgagcctccagagaccgtgttgccggcactcgttccgaagctcaggtaaaagatgcgcgttctccccttcttctcgccccaatgggcctccatcgacgtgatgtgctcgtccgcagcgagcgtgagggtgtttgcccttccgccagttcctccgtggctgaacgtcgcggccgtcggagctttcacgtccagcgagactccatcgacacgctcgcccgctcgaatggtgatggcgccgatgacctggccggctgagaccgaggcttggtccgagaactccgttccatggggtcctccaaagctctcactcaactgtacggagtcatcagctgagaacgtcccggggacaaccaggaagaaaatccacgctaacgctagcagcgtcgacgtcaccacgtggagtgaccccatgcgagttgctccagtgcaagaatggaaatgtgagagcgtctcccctgctgggctcgggagacgctcacgaaagacgatatgtcttaggatatctgggataagctttgggattggacttcctgaaggcactgattaaagcaacattgaaatattggcgttgcgtaacattgagcgcaacaatggtgcctctgcctaacattgcacaatgttacggtatctctcgtagcagaatatttggtttaccaatatgacaatagtggacgcgacagctcgacagctcgacagctccgacagctcgacagctcgacagcgaagcacgctgtatcactcggggcgtgcgccaacagcttccgccgctaacgcggcaagcgcgtcatggtgtacgcgccgacacatgcagcaggggaatgggctctacgggatctacgcgcagctctacctgggcgccacgggttgtctattcctagttggcaggacactctcgcgttggctttcgcctgcggacttagcgacggcacttcggggggcccgcccctctctcgcttcgctcggggggcgccgctgtgcggcctgccccaccccctcgtgccttacgctaagtcctcggctcgaccaggcgcggtgtctaggaaaaaaatatcgggttgcagcgctcagacccgcccccgcctgatcggcgggtgttgacgatcggtgaacgcgctcagcgaggctcgcgctcgcgttcgctcgccctccccctttaacctaactgcgctgttggctagaggcgcattaaaagcgcttacgactgcttggaagatagcgcattcgatcgcatgcaacacgcatcgcgcctaacgcaacgcaacgcaacgcactgggaaggcgtttgctcccgcatacgtagtacacacacgcatataagcaccgcagtaggacatgcacacattagaataaggttgagcgggtgaccactgcagacggtcgcacgctgagcgagcgcgcgggcgctggcttcctaccctgtagattctgatatgagagctgttgtgagccagtcgctccaaacatgaaatttcacgtctggaaaatttacattgcgtcaatgttagcgatcacgcaacattggagcccatcaatgttattgatcccacacattgaggctgattttcaatgttgctttaatgactctccttcctgaacgtctcgattacggcgcagaaggcgaagtacagatgtttcgtgagcaggatggcgatcgcgaagtccacctttgccgctgccgccctcggtgctcgttgaaagcttctcaagtgagctgtcctcgggcgtacactcgtgcttgctcgatgtgcatgacgttcggtggggagctaactgagagagcattcacgtggctgctccttgaatcgctttgctgtactcggtttggttggtgcgatacctccaccgtattcacatgtaaaatgtcgagtgcgttccgatgcgcatggtacccgaaaggataacgcggacaacgttacgccattcagaaagcgtgcattgatccactccttccagcgatagcatagcacactaccggtagcagctacgggctcgaactgttggtgttcctgaattaattgtcctcaggcaattaactttaatcttccaagcttggctaatacatgtatgtattacatgtatgtgcaggtaccggtacacagatatcgatgtgcgaacagcacatccacgattgacggccagctggaaacagggctgggattggaagaacgcaaacataaggtgcgttaccgagacgctgtccggcaaaggtccgtcagtgtgcacagatgcttcgaaagaactgtcttctgtgagctgtacatatattacatgtacttaagtattatatatgatgcccttgcaaggtccaccccacgaaatgacgaaatacgcaaaatgtcgtccataaaatcagtcagcaccgtacagtcacatcatgtgccacccagatttgatgagggtatagacaatgtacgcccagccgccctgtctgccctgctacggtacccccaatcgcacctaaacggagtcgcgctgatgtgagtgtaccacatcactgaggagcctctggtcctcagacgcacattaacttggcctgtatttacatttgtgtattatgatagctagtgtacaattctgcatattgagaagtctagataaccaacaacacggttaatcgttaaccccattaacttggccgatgcactgatgtacatttatttagttgaccgatgcgcattaactcgaccggtcgagttatcatgcattcacaatgcgcattaactcgaccggtcgagttatcatgcatctcaatgcacatttactcgaccgatgcacattaattaactcgaggtttatgtatgtcgtctcctaatcgcacgctatacgacaacattaaaggccgtcggcaagaagcgtccgttctacgctgggctgcattggcgacaaggggaggtggagatggaggatgctggtagacgtagggcgtcctggctggttgatgcagaagtgaggtactaatagctccaactactgatggaggttagtagcacgttcaaaacagagctactggcgagcgaaacattggactggactggctgctgagatgaccattgttatgcattcaagaccttgccacttcgtttataatgacaaaaagcacatattcacagccacactcatatttcggcgcttacacgagctagcgcgttcttttcggccagcacgagatcgtcgaagcaagctgaggtgaatgacacgactaaacgtatcggtagagatttttatttgagtcaatagaggtcaagctataaaataaaatgtggaagagtatgctgaaaaactcgtagtatttcctcatattgtatgttacttcaacagaaacctgatgcatttaactgcaaggaaggcgatagagaaagacctatgcttctacatgtaattcggctgcatgtgccgaaggtgtgcccgtcaaactatgcaacacaagttacttgattaattaaccctaccactataatgtacaagttcttagcgtaaagcaatcctgttgtagcataacgtgtatagtttcagatcggaattggctttagaatggtttaaaattactttcagtttccattgctgttttgtaagttcgtctagcattattgctgtaggtgttactggtgtctattaacccgcgatccactacaggcgctcaaatactgtctatcttttgtatgagccagcgtcgaagaatacgagtcttcgagggcaatattttccatacttcgcgttgctgctttggtacatgtattggcctgagttaaggtggccgatgccacccggtggttaatgcgggtaccgcaaatgcggtcgcaccagcattcttaaccgatgcagccgcaatgcggcctgttgagaacgggcctcaggtcctgcagcggctagacgtatgttttagcctaagcgtgaccaaccttgctgccaatgttgctggaaattgcagcaaacgcgtactagctatcattattctaatacttatggctggatcgtattcgttacagtactgtaaagtccaacccggtagtattagataacctacttaattggtttaggcgtaccgcaaattccgaacaatcataacgacgtctagcacgaagatatattcttttaggggcggaactatgatactcaatgctatagttcttcttttcttaatgcagcctgccttcttccgatccgacctgaggcttaaaaggcatcagtcgagtaaatgtgcatcgagatgcatgataactcgacacgttgcttgctatttgctgaaatacttaatatgagacgctgggattggctaaaacaccgtggctagagaccgagcattctagaatgatgtgcgatcgaatggaggtggtgcatgtgttcttttggacactgtatcgtctctttgcggtgctgcgggcagaatcagggtgtccgcagatagctttggacacaaaacgtattttacaggtgttttggatgcgttgtcccacgaaattgggaggagcgtgtgcctgttgctgacagacgatactcgcagtttagtttagagacgtcgtttggctgcttctacaactactagtactgaaaggcggcaggcttacacgatcctctgctaaactactcatattggtacggttcttactatgggtatttgtacccgcagattcaccaaaaatgacttgttgatacagtttcgagttttttcagcttttatttaatgtattgggacccggggggaaacttttacttatattcgtactgggtgcgtctcacttgggaatccctggcgcctgattcgcagcatcagcctactgtgccgcagaagtgagtgctggtgttcagctttttcttagattgtactattgaggaaacacttgcaaataccaacgaatccacttataattatactagttcgattcttttatcaatttaaaaatacgacttccacactttttagtgcactttaatgcatttaatgcatttaaatagggcttcgcgggggctgagatagcagaaaactagaggtttgggctggtagtgcatatttcaagcacttcagtcctgcctgcccgcgaatgcacttcaatggaggtcggcgcgctcacaacgacgaactcgaagtgctgaaagtatttgaaagtataatttggagtatacttgcacgcatccgcgttgaacgtggttgagtacttgccgtagtgactggcacttcgcaatgcagcgcactaagtcacttctgtattaaataaactgagaatacaatacgccgactacgcattatagaaaaactatcgatactatacgcatctactgcgcctgcttcgcagccgcagcatctgcgactggcaacagcgaccaccagccatgctgatcgtcatgttcatgaggcgcaccacagggccgctttcgagaagcgcggctggcgcagtggtttttcacgatgctggcactcttgactggccggcttcgaaagtcgacaccactgaggccgcccgctccgccaagaccgccagtgccacctccgaagcctccagcaccaacggtggcaccagcaccaacagcaccacgagaagcacccgcttcgagcctaactggtcgttgatcacctcgtacacgacgcgttccacaccacgggcgctgatccatcgtacttcttgtggttcacgcccatcatgtacatgggcgtggagtccttgggcggctccgagttcaccaccttctagcagccgccctcgaagtgggcatgggccttctccgtcgtcgtgaacgcacccgtcgactcgcacacgtacgtggcgccggcgttgtatcacgggcgacgggctgcgcgccgcgaacacgtggatcacctcgctgttcaccaccaggctgtcgtcgttggtttccaccgagccgtcgaacttgccgtgcgtagagtcgtacttgaacaggtgaacgggtcaatagctcgttgatgccatggcgactggacgaagcgtaatgagttggcataatctttctgataaaaaatcgatctatttccaaaacctttctctgcgtcagttcgtaccgtgcaggttcggacaatttcatgtccgaaaattaggctcggacaatcctataatttgatatattatttttaatcattactcccccggtaggataagtaggatggcgcgcctaccggtagcctcaactttaaaaataaagtttggctctccctgtaaccgacgcgcgcaaataaatagatcaccagcaagcttagataacaaggacttcagactttcattccgcgtcgaatttgaccgcgggaagatgccaaagctgcaggttggaaatcgggtttgcggtaaaagtaagaaacacgctggcaagactggagtcatccttcgcgtgctgaaggagggcaggcagcacacttacgaggtccatggagtacgagggctattgacattgtgtccgcgcgctcaataagcattgaagtcactttgaaccacgctggagatggccaaatcagcgatgggggctcattggtacctggcagcacggagggtgcctgccaagtggtttgggaggaagagagttctcctagcggcgaagacgacggcagtgacgatgatgaaacactcgaaggccactcggaagaagaagacgacgataccgtggtcgctcacggccgtatgtgggtaccctgtgattctgtctcagttgacgcggggtgtcaattttcctcgcgagcaactacatttctgtggtcggcgcaccttcagcttggggagaagtccttaattaaatacttctacatcatgtaccccatgggcactctcaatgaaactattcgacttatcaacaataatttggtggcaagttcatttcgctctattggaccaggtgacttttttcgctggataggtattcgtttagcgatggctgtggagccacgacggggatccctgcgggtctattgggaaacacaacacaaagaaggttgcgtgaatactccgagcaactacggggagagatttcagatgacacggcactgttttgagcaaataatgtacgcactttcattttccgacaacaactcgactagtgacccgtggtacccgatacgtccattgattcagggattcaacgatcagagaaccaagcatgtttctcctggaaacattatcgtagtcgacgagtgcatgagtgcctggaaaggccgggatgctaagtacactcacgatggacttccccatgtgactaaaattgcacgcaaacctgaaggaaaggggacagagttgaagtcgctcgcagatggagatagtggtgtgttgctgggactcgaactaatggaaggtaccgctcgccaacgtcgcaaagagtactgtagtgaatttggggagggtacctcggttgtgttgcgattgacggaaaaatacaaaggcacagggagaactgttgtggctgatagtgcttttgcctcggtgaaaacactagtgcgactcgaaaaaaagctcggtctgtattttatgggcattgtaaaaacggcaagcgtagaatatccaaagtgccacatgaaaacttggattgacacgcagccgacccggggttcgttcaagatcatgtcaagttttacggacaacggaaaacccatttatgcgttgtgctgggcggatcgaaagcccaagatgctgatatcgaaccgtggaactaccctcgcagactccgatagtatttgcactcgtcatcgcactgtgatccgcgatggcaaacttgagacacagcgatacgaaaagcgtgtcccgcgtcctcaaatggttgagctttttttcagtaagttctctacttttgacgtccacgaccatcttcgccagggatcgcttgctattgagcgtgaatggattacacagagctggatgcatcgagtattcggaactatcctggggatggtagttgtggatgcctacctagcttatcgccacgaatcgactgagcgtcaatttgtcgaaagtaccgtgctgaatttcagcgattttgtatcccagctcgctcatcaactcattttcaacgagcacaccatgaagcgaactctgcgaaccgacagcgggtcgaccagtacggatgaggtgcgtattcgctggactctattcgctactcagtatatgctgacagtgcgtcgttatgtgatcgccagcctagccacaccttgaaagcctttggagatctcccacaatacagtgaagcgcgtaaggcaggcaagcgtgtgcagcggcagtgccgcctgtgccacaagaagtgctcctactactgtgtaggctgctcggatgtccatttgaagtcgttttacggtgtgtgtgggccaagatcgcaccgtgcctgcttcagtgagcatcttgcatcaccttctatctgaaccttctcttcacatacatatgttgcatcatactaaacaccatataaaaattaatctatgcacgcctactagtaggattgtacccatgctactggtatgctttcgacctggggagaagagattaaagatctgttcaggctgcggcgaagaccgaacgctgtctgtacaagtttatatttcgtcaccactcgtcgattcatctcccagggagtgatggtatactcggtttcattctcaagactgcagctctggttttggctctgttttttttacacctagctggagaccgtcaagccctcgcatccgtatggctccagtgcatcaccaactcaaccctggccagccacgagaaggacaaggacaaggacagctccaccgtggccaagttcatgaaggtgacgagcgactcgacgcctcgcagaacgaggatctcgtgtctgaaggtcgtcgactgctttgaccaggtggccaagaccaacaagacgacggaggcgcgcgagtacattacccggaatggctcggtgcagaatggcaacacgtatgtcgacgcccccgacaaattatgtccccagtcgggatggtatttccattgccaaatttggcagcagatttagcggcggtctaatcgcaaatacaaaaagtcaaccgctgtacaagattagtgtgggatttagttttaccgacgcggacacctcccgattgtttatgtgaggacagaagtgggatttctttcgttcttatctctagcttggggaggggattccaagtcgccacgaaactttgaccttggccaacttgcattatccgcacaagtcgaacaaatgatgcgaggcagggctcggtaaatccgtataaataaaaagtatttgcagtagtttactgcattaactcactgataccccatcaccaatgtcgttcaattagaaatataaaaatgaaatctacacaacttatgcttggtataatggttggaaattattaactggtcagatttacacttttaactcttcactttcttaagctagtcccttttgcagtgtttttctagttacatgtgtctagctgacgatgcaaaagtgacaagcgataatgtaaaatagggatgcaattccatttttagtttacccgtgcgcagtctcaatgtctaggtttaaataaaaacagaaaatgcagtgccattaaaatggcactgcattagtctgacccagagtaaatctgaatagcattttgtttttgcttacaattattatacagactgtataatacagtaaggcggtagtctgacatactaatattcaattcagactagttacctatattctagtaagtaatccttacttttgtactataacatgtttttcaaataacatgtaaacccaacaacgtatgtatattaaaatgatttgtttaaaaattttaacccatcttttttattattatatgaaaatattaattttgactagtaaaatagttttcatttccgtaaaataatttccaactagtaccgtaaaatacgcattctagatctccgtttagcggtcgtaatttaccagttgttccgcgagcgcaacaactaatgagcagcagcagcgcgggcagcacttcggtcgcggagcagcccgcgaccatcacggtggcgcccgcggcgacggtcgcgtcgtccggcgaccagtggcgcgtgttcctggggctggcgctgctggtcgcgtcctacgttctacgcgtggaggtggtgcgcttctccctgcgcgtggcgcgccgcatcgtgccggcgctgttcgcgtggctgcgcgagttcgagaagatgctgctgcggccgctgtcctgggtggtcttcgtgctgctgacgtggttctcggcctacgtcatcgacgtcgagacggtgctcagtatggacgcgggcacgctacagagtatcatcacgctgctgctggggccgccgctggtctgggtcgtcatctgcttctgcaactacgtgacgtgggggattgtgcgcgtgcagggctggagtcgcgccgtgtccaaggacgacgatgactacagcagagtgatgatcatcacggagggcattggggtacgtccccaatgtttgcagcggaagatttcaagatggttgacagtctcttttggcatttgcaggtgattaaagtgctgttggtggcgacggttgtgtcgacgtgtatcattgacgaaatcggtcgcttcacggacttcgagtcggggcaggtttccacggtggcggtgatcatggtggagtttgtgttcgtgttcggggctcactcgtgggtaagttatacgaagcatgtttttgttttgagttttatcactttttcatctgacgtttgttgttattgtgtgtgatgtagctgaagaatatcatgggtggattgatgacgctgcaagacgagcagattaagagcgggattcacatatctttccaaggccatgaaggcgtggtggagcgtttgtttctgcaagggttttcattgcggcagtacgataaggggctggcgtacatcccgaacagtatcatgctggagaatgctgtgaccgttcagagcaagaatctggaccgacgctgcgtcattcccgtgcatctaagtcactcaacgccaacgacagcgctgcgcgtgtttattcaggagctggacaacttcctcatgctgcacatgatcaaccagcgcacgaacgcgaaggctgacgttcttgggcttgaaaagccaagcggtggctggaacatgatgaacgtgtacgagcgcagtaagaagctggcaacggaagaagcgcaaccacaaggccgcttctggatcagcattgaggcgccgtaccttgtgcacgtagtgtactactcccaggagcggcatatcaagggactcttgacggagaagactgaggtttgccaccacttcttgctgatttatttcgcttgggcgttgagaactaatggtatggttgcggtatgtcttacttagattgtgctccagataacggatctgatgacgaagcttaagctgagcttacacgatgaagaaggaggaggccgcgctagcccgtctccttccgctatgtcgtcgacatctgcaagtgctagcgaagccccagacttaaatgaccgtcactcgagctttagtccggcaccgcttcctgaagtcgtgaccaatcgccggcggaggcgggcaccacctgccagcgagccacttggacgacgagtcctgaacgagttcagcgacggcaatatgttgcgccaccgtcgacctcacgataaccgtggggaatttgtataatttatcagtattcctcgaaatatcaacgtgtcgtttgctgcacattaacacggagccgctgaatcgtgtcgataatgacaaaattcacctatgacaacatttcaaattctgctcagctaaacacaagaaatatcaacagtatagcggtatcaaagaacccacctctgttttcgcctgttcgagcgaggtgaagcgctcgcgatccatcaggacgaccaccttcaccttgaacatcgagtggagttcgacacgcaccggcgggggaggaggtgcaatcggtcggccggtcgcatcaaacgcgctcgaagttgcactcgaccgtgcacgtgaacggggtgtcccagtgctgctgcttgcagttgactggtgtcgatctcctaaaatgctatcgtcacttccagcgctggtgctgtcgctgctggcactgcttgatctgatcgcgtatgcctctcgccgatctctgcgtatagcagcaagcgcctcactggtcaaagcgtacgttggcaacactgcctgaagctcccgcatgaactccttgatcttatgagagggagtcgtagggtgcagacgcagcataagcgagtgcgtatgcgcgtcaagcgcattgccacttgtctggtaattgtcagcaaagattccgttcggcacaaatatcctcgacccgtccgtgcggcgcatggttgtacgggcgagtgatacccgctcaatgaagcccagtaagtgccgcaccttgacctcgctacccgttcggaagggctccgcaaagatgaggaagaggcccgtcgccacattcttcagctaaactcaagcaaccaacagaaaagaattaatatcacttcacaatgagaacgatgcaaacaagtagcaacctaccaccgtaaaacccgagagaacggcaaccaactcgacgctgagaaaccccacgacgagcagaaaccgcatgaacgagttggagaggaagaaaatgtagaaaatctcgatcaggatgaacacgacgcacacgaacttgatggactcggtgatgacgaagatccgagcgtcgtagtccgacgagtagcggtcccatttgaagtaccggatgaatatattggtgacgactttgcgcagggcaaaagttcccatcaccagcggcaccgcgatcaggtagctcaggtactgcatcacctcgtccttctcgctgcccaggtccagaatgtagcgggccaccacatcgcgcaccagcaccagaaacagcacccaccacaggtacgtcagcatgtagtgatgcacgtccgcgatccacctgcagcggcaataataacattaattataaattctggaaaattcaataattaattaaacggagggctccgcaccgcacgcgcttgtcgagccgggagcggatggcgttgagcagcatctcgatcatgggtctggacagcaggaacgcggccagcgtcgccagcagcgccagccccacgcgccagaagatgaacgggatcatcgccccgacaaaatcctgatgctccgaattagctgtaaaaaatactttgcacgaaaaataacgtctttcgtaaatacattacctcatcgtgaataaattacggaaatagattaccgtgtcgttcaatccccgaaatgtcaagtcagagtcggagctgagtccagcgcaagcggcaatcgcgcaccgagcccgttgtcgtccgcatcaagtcgacaccgcgtggcatcgcatcgcgttcgcgcccctaaaaccgcacagtgcggcgagctccatgcagtcgtaaggaaatggccaccccacgaatgtgaatccgacggttaccacctccacgtttgatgcgcgagtttccaggtggccaatgtcccatgagcctttcgagcatggccaattacacacatctcggtctccattggcgggcagcgagcggtccgctttgaagctgtccgctccgttcatgacgcccacggtggatcctgcctggcctgctgcatgcatgagagcagtgcggtgctcgaaatcgcatcggccgagtgaatcctggcagtcccacctttgtatctcttgactctagcagacgtggatgagcccgtggggactacgcataccgtggaccacatctcctgcgctgctgttcttgttgctctacactccgtcgcagcagccttaggacatcagcagctcggagctgtggccggtctttgacggtgcaactcgccacaacgcgcagagcgcggaccagttcgcgttgcgctgcctggtccaaaggacttgggctttggacttggaggaaggaaggcgagtctccattggcattaggtagcagcggcccaaagtgacgtccgagtccacatcagaatcagcagcagagcagagcaggcagcaaccgcaggcaccaacaaacaggtcggggacatcggtggtcgtccccacgaagggctccgttaaccatttgaccgtctcatgacctggccgccgccttcatcgctgcgctccttgagcagcagcagcagcagcagctatgaggccgactgggactcggactcgggcctctcggccgcgcagctggacgcgctgcacacggtgatcctgtgctgctgcgcgctgtcgctgggcggctgcctctacatcgtgcggcaccactacgtctcggcgcggctgcacagcggcgtctccatggtgcagaagatggtggtcgtgctctcggtcttcgacgcgggtctgtccttccccaagatgttcggcaacctgctctcgcgggacgcgagcgacgacgtgagcgccgcctgcaacgtgcaggccgtggcgctgcacgtcttcgggctcatgtccgtcttctggaacgccgccatcgcccactgcttctaccgcaagatcgtgcaccgcgacagcgaggcgcggctcaagagcaggttcaagctctacgtgctgctggtgatcgtgcccgccgtggcctgcagcgtggcgctctacgccgcgaggctcttcggagacgccacgttctactgctgggtcgagtcgcgcgccaagcagttctggacgttctacctcttcgtggtgctcgccatcctctacatcagcgccatcctctgggtcacgcacacgcgcatctcgcgcgacttccgggacgccaacctggacgcgcaggagtcgtgggcgctcatcacgtccaagctgcggatctacatcgccgccttcatcgtgctctggacgcccagcacggtcttccgacgtgagtagaattgtcttaattgttcgtcatggctaaagtttgtgggggcgttctgaccttattattgtgcagtgtttgaccaggagctaggctctgcgaggttcgcggtggctgtattgatgcaggtgaccgtgtgcacacagggcttgatgaccgctattatctacggagggctgctgaccaagctgtaccggatagtctcgtgcaagtcgtccatctcgccagcgaggaagtttgtcaactcgccgtcgttccccacgatggacacgggcaccgaccacagtctggtgaagcactaccgccagccagcgaacatcttcgtgtcgacgttcaacatgggcgaggcacgactcacgcccgctcaactggacaagtggattccgctcggacacgatatttacgtcatcggactccaggagtgtctgcatctggcgaacacccgcagcttgatccgtcagcatcttgaaggcgggcgtcctcgaccagcagctagcggacacgcgcgtcgagcatcgaagttccatcagttcaaccgcgagattggcagcaagaacacatcactgggctaccatggccacatcgctatcacagtcttcatcaagtcgtcggatgtggatagcggcgccttctacatgcctcccgtggtgcagcaagaggtcaacgtcgggaagtctctggtactgggtcgcgcatccaacaaaggcgcggtcggcttcgccttccgctattacgacacatcgttcgctttcgtcgcgtgtcatttatcgtcggaccccaaggtacagacctttgcctgccatgtattcctgcttagtgcaacttgctgacatcgacttgttaacatgttgaagggaaagtcaaaggttcggcggcgaaatcgcgactcgcaggatattctgaaggagctgcatctgaacctggaagacgtgggcttcgagttcccccacgtccaccaccacagcttcgtactaggcgacctcaactacagactgacgcagcgagaagctagcgcagacaccatcctagagctggtgtccaaggtgcgccagtgcgagactgcgaagcctgcgccgatgaaacgcaatcgcagcttgcgccgcggactgctgggcaaacgctggagtcccatgggcactcgcggtctcagcagctctttcggactcggcagctctctcggtgccgccagtgacagggacagcaacgatctggacgtcagcatgctggagcgcagcgtgaagagctacacgtcggcacttgcgtcttcgcacggtagcaacaacagcatccggtactcagcagactgcgagctcgtggacgacgaccagttcgtgtgggatgacgtgctagcgcacgatgagctccgcactgggatgcgagacgggcagattttctacggcttccgcgaggcgaagattgcgttcccgccgacattccgtcgtgtacgcggagcagctttgaacctggatgctgggaattggccggttgaggagctggcagggtgctacaccaccgcagtagagggccacggcatgcgcgtaccatcgtacacagatcggattttgttcttctcccagcccgacatgcgccaccgccttcggtgtgctgcgtacgcctcgtgcgaagaagtgagctgctcagaccacaagccggtgcttgctgtcttccaggcgctagtgaaccgcgacatcctgccgatcgagacggaactggcaaccaagaagcttcagcgcatgcaggacgtcagcggcgtgctcgagtgccagctacgattggacttcagcaacatttcgtggcagcctgacaccgaggccgacttccctctcacctcgatcggcagctctatcgatatggaccagcgcttctcgagcttcgatcgccatggacaccaagtgatggtgacgatcgtcttcccgctgccgtcggaagatattttctcggcgcagcggaagctgctggagctcgcggactcgatgagtggcggcgtgtacctggagaacacggatcggctgctgtgcaagaccaacgtggctcacgtcaagtgggcggactttgtgcgtgacggcatcacgcacgccacgtatgctcgaccgacggggaacatgcacgtagcgatcaaggtgcacgccggcactcaaggcccatgcttcggtcaaggagtgatctgcatcccgcagagctcacacgacgacagcgatgatgcacccgatgggatccagaaggccaacaactttgtcgtggaactggctgatggcgggaggcatacaggcacgctgtcgggctcagtgagtctgctcctcctgcagcgcgcaagtggcgcataagttggtgctacataacaggagatacagtagttaattattctgggaacacccgaagaatgagggaccattttgagaagttctgctgataccgcaaaacgcacttacactcggcgacaggttatatcggccaccctcgtttgtgtccgcaactttgccaatttttcgagttggcgctcgctatttagatatgtttgagctttgattggtagaaaaccgctacatgtgttaacccgcgggaattcccagcctatcaggtggctgccatacaactatgtcattttggcactgcgccaagtataatcagccaccccgaggcatacaaaatgcaagtataaatatactggaatgattctaacaaaacacatgttgcccccgatttgcatgtctgcgttgccgttcttgtggccgacaggggtcgaaatgttgtctcccttgccttcaggaaggctccctaaagtctatgctttatgtggtagctggcgttgacgtgcatgctcggtgtggcggtttccacatgtccgcggaagtcaccaaccccattttccgtcgttttacatacataggcagctgaaactcggcaccatgctaaagtgcgtcgagcgagccacttcagacaatgcccaattgcttcatcgcattaactggtattcatatgaactaggtcaacgtttattagctggataatgaagtttgttcgcctgctgcggcctctccacttcatcatctccacccaccgccatgcaaatcgggggcaacatgtgttttgttataatcattccagtatatttatacttgcattttgtatgcctcggggtggctgattatacttggcgcagtgccaaaatcacatacagtaatgtgcgtcaataagggacctctgatatgaataggagtgtaaaggctattaaggcgaacaagtggaaaaagaaagaacaatgtattgatttatttagttaagaataaatgacacactgcttttacacaagttgtcagctgaagtttgtatgtaatgagcgtggagtgcaaccagcacttgtagaagctgacacattatcccacgcagactcgcaccacttcatggcagttagtaagtcgactgtatgtctaggggtgcccaacttcttggctagcaccgtagcatagaagacgatcattgcaccgctgaggcatattccctccgcctctgcaagcatgatgaactcgacgatgttttgatcgacctgtagctggaacggagacggcttgttcttgcgctgagcactttcgtgaggctggcgcaacagcgcgatacgcccccgagatgatgcggccgatggtggctttcccagggggcctttgcagaccgaactcgactttggcccaaagggccaggtcttcatacttgacagcgggggagctctcagccttcttgatcagacgcagcttctactgctgggtgaggcgagttctagtcttggaggaggagctcatgaggtgggtggatgggtagggcgctggtgttgtggcagattccgttgtgcttggagatcgcgctgagcgggttggagggaggagttatgttcgcgcccgaattcaaatggtagcttcaatcacggattggctagatctgacctcactagccaatcacgtagtcgcgctcgttgcgaaaccagccaatagcgccaggatcctgtcgaaagttaacttaaatcaatgttagctgtgttcttgactgacagctgtatataatgtatgtaaggatattagttgccacacgtcccctattgacgtacattactgtagttgtatggcagccacctgataggctgggaattctcgcgggttaacacatgtagcggttttctaccaatcaaagctcaaacatatctaaatagcgagcgccaactcgaaaaattggcaaagttgcggacacaaacgagggtggccgatataacctgtcgccgagtgtaagtgcgttttgcggtatcacgaactgtgtgagttgtatggttatctatgtgtctcaatgcgggttagggttacagccggaggaggggtgcaggtgaaagcgatttccaggatttcacaaactcgcccctaccgaacctgagaactataggcaagcctgggctcattgtagagctagccttgcccattagctttccaacgagcccaacttcacttgatgatatttcgtgcagccttcatgcctttccgtttcctggagcactggtgaaactttggagatttggcgtgggtgacctccgtccccgcccagctgccagactgggccaaagtatggccatgataaaagcacgatttgcactggggtgttttattgcggtatcagcagcaagagccaccatacatgcattaacgggctgtcatagttgcagcaagtatgcctgccagcctggagatatatgtcgtgtagccatcataaagatttgacttgcgaattgtattgtttatgttgaccatcactcctacatatgtaaacttgcgcgaaggcgtcctcgccaccaattcatgttagacttgtacgttgtagtgctaggcctgagctgcgcaaaatgtagttagcgcgcgcgatatcttcaaagggcccatcatctcatcattaggcgcgaactcttgcgcgggctcactgcgatgcgccttctcgtcgatgggtgcgaaaatcggcgtgagccgaacgagcttcaacacagcgctgtaggcacaaagtacatacgcgagctacatgcactcacgtcggcctgcaacgtagatgcaactgagccaacgtcagccaaaggagactcgaactcttctcatcagtgcaatctttatttgttcacattacgcacctatacagatgccaatacacctatcgccttgcacgctcctttgccttgctcgctcttctggcttcctttcgccttcgcacccttacggatcttgagcatcttggagatggcgatggcggcatctgtccgatccgcatcggcagatgaaccacaggtcgtcgccataatcgaccgtcatctcttggccctgacgaatgtcttctgtgctcgccatgacaacggtggtgcggcgtccgttggagacctcgacgaacttcgtcagcggctcgcaagagtggtatacgaaccgcatgaggccgcccatgttctctgcattgatcgccacacggacggggtgcgtgggcttctctggctgcatcttcatcaccaaacgatagccttgttgcgcggtcgtttcgcgcgagaagtgctgacgtgctccatctcgccgaggtattgaccgaagacttctccagcttcaatggccccagcggcgaccactccgagcgcctttgtgcgcagattcttccccaggtagatcttgttcaactcgcccagcgcgttcccacagaggcctccgtaggagcaacaattaatgtttcaatgcaggtgcatgcgcgagttgtggcaggagtccacgcggcacggcgacgggcagtcgcaccacccgaagtgtggcaccgccggaaagaccgtcgccaatggattgaacagcgcgcggaggtgggccacgtgatatggccaccgagctggcacgaactgatcacgtggccgctgtgcttgcggtggagagcggcgcatcacatccgtgctggcgctcatcgatccacgtaggtcgacggcgggtcgatccggacgctaaggcaccgacgggcgacggctgtacggcgcagcaggctcacgccgcgcacaacgtccttcttggtggggctgaagcgccttgcgtggtctggggcgcaccggcgacgttggtcgcgtctccagcaaaattggcgacgacgtcgtgcggctggcgcttggacgggttgtcggcggcggcgacgcaggcgggggtgttgcctccgggcttggcggtcgattcgtcactgccttggagcggcgctggcacttctccggcggcacccatggaggagtcgcggtgccagtggagctggcgcagtctctggagggctgctcactgcgcttgctgccttgggtgtgctgcgggcttgcctggacgttgggcggcgtgttttcgtcctcgctagaagtgtcgaagatgcagcgaagctgccagtgagcgcacacaaccggtgagtcctcgtgatcaccggcaacagtcctttggctacaagcaaccacacctttcgaagcggcgctctgctgtcgacttgctgccttcggaggcgaattcgcaaatgaccgttgtttcgatccgtcgtaagatatatgcaacgcgaaaagcccacagagtgaagcaagctgctagcgccgcaaagacgctcacttttcgttttgccgaacaccaagcaagccccccactccacctgcgtacccgacgccccacctccaagcccggtacacgagtccagcactgctgactgtcccgctacgtaacgtgactgactctgagctgtctgctgtgtttgtagatgccgaatcactctggtatcgctaactacacgatgtccgacgtcgatcgactcctcgcgctcgtcgagaagatgctgccgccgggcaaggacgaatgggggcggctggtgatggcgtacaacgcaaacctccaacgcggtgcgcccgcgagagactacgagagcgttcggcgtaagttcaaggtactttacagcacgaggaagccgaccggcgtgcaggagatgccccccctcacatcaagtaggcgaagaccgtcaagcaggccgtcgacgccaaggccaacgtcgtcgagatggacgacaaggctgacgacgaccagcccgacttctgtttcgaggtggacccggacgacagcttgtacgaagacggcgatggcgacggcatacaagcatgtggtaacgccgccgtgaccggatccaccggcggcgagtcgctgggctccgacgagtctctcgacgacgagttgacggtgtctagccgctcaacgagccggggcgagttccaggacttgctcacgtcgccattgggcatggaaggtctcgacgaccttgcccacacagcacatcctgcacccggccgagcggggccaagtgcacgtcgttcgggctctggagggccaccgctattacgcaaggcggccgtcaatgctaccagcggcggagctttgctgctgtcagccacgacgatctcgaggcggccagataccccaagtttcagacgtcgttgaaccgacttggcggcactgatctgtcaagcttccgcgacaccgttgacgccaagcgcgcgagagaagacgagaaggacacggccgaggcaagctacgccaggctaagaggatccgcgccataaaggcgaccaccgccctcaagtcgaagttggacggtattgagagcaacgccagcagcatgcgcggcagcatcctcgaaacactgctggtgctgcgcgaggagcgcgaaaggaaggctgagggccggtcttaaccactgccatggcatgccataccatggcatttggcctccgtgggatggcaccatggcaccgactcaataagaatgaaagtttgccaatgtagccatcacgtgccatacggcaatatttcagatagaaaattctcactgcaaaggaaacatcaagatgagtggcacggcaagcaagcaagcaagcgcgccgcgcacgcaacgctcggcgcccgcaaaggcgctcgcagcgcccctgctaagtcagcagccgcgcccgctactgttgaagaagctcctgacccaccagccgcctcgttggatggtgtcgcgaacgcaccattagcagtgcgctcgctgcttgctgctgacccgacagcaacttcggcccaagttgaagctgcccttgaaatccagcccgctcgaacaagtgcggagatgcttcgagcgatcgacgaggtgctgggacctgcgacggatgacgaagaagctcaagcgcatggtgtcggtgatcaaggtgctgggactgctcgaaatgctggggctgcccgagatgctgggactgctgtcaatggtggacctccggcacaagagccgagtgcaggctcgtctggtgaccaacgcgctgcagcaagacatgaatctgtgacgaactggactgtccgcaatcccgggaaggtcgtgccgccgacgtgcaacgactacagtatgtggagtgtcgtacagcttcgaaaggagtgtgctcagaggaaattccgccttgggcgaaaggtgaccaaggcggagcagattcagcatctacgtgcctatgatgcagcacagtaagtcgtccagtcatcggtggacgatgaaaaccttttggaggctcgcctgcgcaagacgaagcactgtgttgttcggcccctaaacatcctgtgctctgatcaatttattcagcggcttatatcatcggatggtgcggcgacacgagatcaaattgatgccggtgaagtgaactagaggacaacactttggaaagaggttggtgttcagcatcgtaccaacacgatcgattataaacatctttttgctgttgctgcaaacgacccccgctttgcggacatcgacccatcgcacgttgtggagcatgaaactgctaagctcttcgatacgtggaagaaagtgtacggcaactacgcgaaagcctacgccaaatttttcgtgtcgggtcaaaactccgaggagttttacaatttttgctctggtgatttggacgttgcgtttcttcgagtgtgcgttgccgagaaaccagaactggaagctttcgttagaggcgggatgcatgaacaggatgaaattgactcgctggggctggcagcactacctccaccatcaacaaagccttcgaagtggcaagaccaagtgctcaagacggttaattggatagcggatatcttcgtaagagctccggctgtcgttgctccaccctcgatagctgcaaccactccggcgccccacgaagaagacgtgctcatcgatcgcatcgcgaaactccaccagctgattgatcaagttaaggaatcccagcgaaagtcggagcaaagtggatatgtggactctacgcttgttagatgcatcggtctttaccagcaacgacttcagcactacgaatctcaacttgcgagcctgtactagatcgcactggtacaatcagtccgggcgccgctccacaggctgtggaccacagcatcatctcctactaaatctacttatacttcagttgatattgcgttgcttcagtaaaactttaaatgcttgtttatttaacgtctgccgcaccgatgcacagatcactactagttttccttctcttctctagatcgccgatctatattacggcgggggggggggggcaatatccccctgggtacactctgactggctgcgcgaagagcgccggctgtatgcttaccgggcgcccttgaagatccgcccgatatccttggtcttggccaatgcggcggctccacgtcggcgggcgtcgtcttggagccgctggaggccgttgagacccgcttgaagtgtccgcgatcttgggcggtcgcacccaatgtaggctggctcatggctgattcaccggatgagtgtactcgccggtgccaccaacttcgccgtcagtaccactgtctggacttatgttcagcgactcttcacccggcacttcaactggactccgacaactccgctcaggcccatgccgctccgctcaggcctgcaacactccgctcggcttctcgacttgagcaaagacttcaaacattgcattcgaggactcttcgtcactccgctcaggccgtcaatcctcgcccggcttgtcgacttgggtgaagactccataaccacggtagaagctaggctcgggctcagcacgacctcactcggactcctgctcctcgactcagcttggcatcttggacgacggtcccacaaccactggggaggttgagctcaaacttcatccggctccgctccgctcagattctgggcttgagcgaagattgtctgagacccgagatgtatcccaagtctgagctgagtccaggaagcagaaagaagctacgcggagtttgagctgagcctcgagtgtgatgaccggagtccccgctcgggtcgaggagctgagctccgcccagacctctggctcagcttccttcgtcgcacggctcgtgtccgacagttggtggtcccgatccatcgcggccatgacgcacttgaagtcggcttgattgatacgggtcagcatcctggattgatacgggtcagctggacatgggttcggtggcgaaatccaccgagccttttcacaagaaggtcgactggaagtcgcctgaggtgttgcgactttttcacaagttcctgaaggtagtggaggagttcgatgagaccaacaaggacaacccaaaggtcagacaggagcgcgtgtacagcattacagcatcattccgaccaagcagggttttcggagctcttattttagtacgacctctacggggctgcggtacttgttgcggagaagtcgggatatgctactattgtgtacacggagggtggcggaagtatctcgctccagaacagccttaaagatagaaactcgtctgggatagcggacatttggtggcgcaagctatttcgtgtaactgaccttgaaaaagagactcgactggtgtttcatggcgaaatctgcacggatggtatcggtgcaagtatcctgctccacaagcctaagagagacccgaaagccaagccccccccccccccccccccgcccaagactgagaacgacgacgagatcaagggagcgaatcctgggatgaccgacatgttcgttggatgtacgtacaaagtcagctcacaaactttcagcgacgactttcttagctaactagccaagaagttctacattctacagcgactctggttacgcgggtagtaatcgtaaaattcgacgaaaactcgatcacaacgcggaaatcaagaaggtgttcaaggacatgccgacaaagaagacagcttcccttacgaagttgatgaagtatctcgactacactgtgcccatgatggagagaatcttttcgttcttcatggcaaaaacctttcgcgacatgcgcttccgacggcaaatgttggctaagaagaacctgcgagctatttgtctggaactggcaggagagcctggcacgcgtactttgatcgcgttcggcaactgggggttgacaacagcgcggcatcattacgaagaagactccgggtccggtcatgaagctccggcgcatgctcacggattatccaggtgttgacgttatgatagtgggacgagtatcgcactagcatgatgcaccacggctgcccctcgctcgctccaatggagaaccaacaggttaagcaccaatgtccgacaaggttgtacgaactgttggagtgcacaaggtctaccgctgtcttaaccggaatggtgtttgtggagcgaccatcgagcgcgacgtgaatgcctccaagaacatggtggaggtggcgctggcacaaatgcgcgacggcgatggtgcacgactggagcgtcttcaacggccacgacgatctgaggatcactgatctcaacaaattttatcccaaggccccgtgggcgggtgggcaggtgggcgtagtggcggtcacctacgcggccgcgggatcgatgccagttcatgcaaggcgtgcgccggctcgataccagctcatgcaaggaaggctcacttattggacgccaaatcgcatcgaccattgcgacttggtaactaggtgcatatattgcgttttagtagtacagactagagcgtgagaacgagacgcctgatatatccggatttaaaagggagtcatatgtggcagacacaactttatgttttttacattgactctaatacctgatctcatcggtaaaaacgggtattagtttttacccgtctcgttctcacgctccacacctttgtgcggccaacttcgtaccaacgtgcaatcaaatccgaaagtcgcaaaattcatattgcaaatttctagttagcaacttcaattatgcattcaaagatggaatttacggcaatcaaagttggaccagaggtccaagatctccatggctacgtaagctggcgtgctgtgctcgcgccaaaagcaagggcgcgcggtttggcgcgcactatagccgacgccgaccgaggggagctcacttcgcaattcgcctttttcttcgcagatgtccctccaaggccgcgttactcgccctcgagaagcagcgtcctaaaatcccgcattaagcgagacttggctctggatcgccacgcaatctacgatcgctcgcgtgagccagacagcaacggtgagatcctctccatctcggaacgccagatgcacatcctggagcgcgcgaccgccaacatgaacgtgatgaccccagcgctggtggccagcatggagctgcactgtcgcgacttcgccaccaaggcggcgaacaacgaggacatggtgtacggcatgtaacagggctcgtcggacaagtagtagtagcctactgtacgaatttgattgccgtaattccatctttgaatgcgtaattgaagttgctaactagaaatttgcaatatgaattttgcgactttcggatttgattgccagtctgtagtagttttgctgcatacttatgccgtaagttacggtatacgggaattccgacggagtgtccgcaggagttcccaggtgagcgtagcaatctactttagtcgatgactggcatgtcgtacttgtaacgtagtcaatggattcaatgtcaatcgatctcaattcaatctgaaatcaacagcaaaatgctggagccgagagcatccagacaaacaagcgtctataggaggagtggaagaggcgagaagcttagagctcgtcgctgaggccggcgtcggcctccaccgtcaccttcaccgtctctgccggcgtcggctcctcctccagagcctcgtactccgcgtacgtcaggtccttggggttgtcgaagtgcttggcccacggctggaagaacatcatgagcgcgaacgccaccagcagcacgaaggacaagctgcaagaaaacacacgcaaaccaccgcaagtccatcagcatctcaccacaaactgctttcacgcaacattacagaacttacatggccttggtgcggttgtaccctgccacggagcggtggaacgtgtccagcgcctcctccaggttcttaatcttcttctcgtaggcagcgcgcagctccggagacatgcggcccttcttcacgccagcctcctccagcttcttgtcctggaacaccagcgcgttgtacttggccagctcggcgcgagccatggccacagcgcgagcgcttttgccagactgcaacagcacgagcacataatcaaatgagtcggtcggtcagttgcgtcctgattaagccatcttagccgactgttacgcacctgcttggtcgtgtagcgctggaactcctggtcgaactgctcgaccgcgcgcttggcggacgtgggctcagcggggggcgtctgcgtggagctcatggcgttgaggggggcgaaagtctcacttggtatggcgctgatgtggagagtaccaatgatgctcgtctggacaataggtttcggtggtgcaaaaacaaagcatcgaggataagacagttgaagcacaagtgtacaagtgcacacgctggctctgcaggaaggcccgcccaagctgaacaggaggttcgccttcaccgctgaacatttcattcacgttatgcggcagattggtttagtgtggctttggttaggtagatgggggctgagggcttagcttagctttcgtgaagacttgtgaccgtcaagacgtagaacgtggtcccgaggtgaagcgcgtacgggttgttgccctccgtcgccgtctgctcgtcgattagcacaatgcggcccaccacgtagtccgggtatctgacacagcaggtgacacacactatagttagtagacgcgaccaagcaatatggggactctacatgtagtccgctgcgtacctttggccgtcattgctgaacgaggagatggattcttccgagaggaagcggtgcgggcagccgagatgaaaggccagatacacacgctgcgcatcgcttccgggggccgaggtcggtaagaacagtgccaggtcattgacgctgaagctccggaaggagatcttgaacgagtcgttcagatcctgctccgattccatcaagcggaactcggaccgccgctggtccaactccgactgcaacatctaatgacaaactgagaattagcacacgattccccagtgattatgagcgatgatcgaatgctggcatcgtaccgcttccgattcagcgcttgctaggagttccttcacacgcgtctccacagcgtcgaagttggcatttacaaaggcatcgacatcctcgtcctcgactgtttgcggctcaaggggaagctgaagcagcttcagcagcttggctaatgacgttcgctgggatcgaacactgctactcagacctttgactgtctgctgaagcttggactggttctccttgagttgcttctcgcgctttgatcgctcctggatctccgtaaattcatcgaacacgcaaaacaaaaggcgccgcaccagttaaggaaacctaggtcaagcagcaacaagatatcccacggcagcagggaacatgcagtaaatagttgaaaaggatattcttcgaaggccgccgcattcagcaagaattgctggttttcactctaaataacataaattacgtacaaaggttagcaaacaaaaacgtttgtggataccgcaactgcaaccatacctccagcttggcaatagtcgcatccttgttatcggcaccagagccaatgttccgcctcaccgttgccaactcgcggtcaagaatgttggagcgatcggcttccgaggaactggtcatgccgcccgccgtcgctgccaaagccagcaccaacgggaactcgcatgaactttctccctctcgtgcactattcttcgacatatctgaccgagaagttgagtcgcttcccgacccattgtagtacaggttcttctttgactgctccagctctgatgtaagttctgctacacgtgcttccagttcgttgcatcgttcttggagaagctccgcgttggtgatcgatcctgaggaactaccatggtcctcacaatcgacgaattcgtccgacggaggatggtccttctcttcaaacggatcgaaatctttatcatcttcatcatcttcgatcaaaggcaggctctgatcaaatggtcgcatacggaactcacagtgagatggcttttccgcaagacctgttacgaaatcgcgcggcaaatgctggccgtagcttcgcaaaaattcttcacggtgttggacctggtagcgaagtacgataatcgttagaggagtagcagaacaaattctgtgagagttgcagtatcttacctcatcctcgcgtaactgtgcaagttcctcagccatggactgaatacggtctgaaaacatgcgaccgtacttcaggcgcctcgagatttcctttagacacgcagcgtacgattctgttgacacgaagcattagccttaattccatcagaccagtaataatgctagtaacagtacctggtagcttatccagatgctccagctcatggaaatgcttcttttgggcggcaagtgcctccctaaatacggccagagaattttcgaaatcacggatcttggactgtgagatcgaaatctggcgcagagttgagtgtacgcgcgcgaaagtcgtcgctttcttggctgcaatgttgtgtacatgggctatgatatcctccaccagcttctgtgcatccggaaccatattttgctgtccttgatacagcgcatcaatccgtcggcacacatccaacgcgttggtagatgcctgcatggggttacttccgctggcaatcgtagacgtctcctcgatactgctgagcacgtactgcaaattgtcacgcaagttacttgtaatgctcatttgcttgcttcccagcgccttcatttgttccaattccgcgctagcctcctcgtactcccgacacgcctcagcgtgcgcgttcatcatctcggtcacctccttgcatatgtcgtcgtgaacctgttgcagcttcagcacctgcgaccgcacatgcgtgtgcgactgctcacactgcgccgcccactctcgctccttctcaaccgggatgcaatcatagagcgtctttcgctcttccgtagccaaggccgggtggagctccaccgtacccaacgcttcgatatagctgtcaaattggctcagtaagcgctcgtgcttgtcggtcgtagcctggaaatccgcccagaacggagcaaagtgcttcatcatcgaggtcttgaacaagtccaagttcgcgactgcggcggcaattgcacgctcctgcacctgcagctcctgcgcgccccgctcactcgcagtgatattggcacatgtgccactctccagcgcctcgctttggctgacctggagctggaagtatccttcgtactccaccagcgcccgcatcatcggatgcgaactctcactcaacatcttcgaaccttccgacgacgccaccggctgcgatggcacttcaacattaacatcataacaaaaatcagaatcagcgtaaatcacactaaaaagcaattaccgaaaattccttacgcttggcatgaactggagttaacgccatagcaggcggaggtgtagccgcctcttgggacagcagtcggcggtcgtacaagaacacctccttgtcctcctgcccaacaacacacaaccacgcaataattatcaataaaatcccactaaataataaaattattttgcagcgcgcgcacgtacagccggcagcccgtagtactcgacggcgcggcgcgggtccaggcgggcgaagggcgggccgcagagcaggatctgctcgcccacggggacgccgctgagccgcgccagctcctcgcgcagctcctcgaccacgacgctgccgcgtacagggagtatttaatagttaatcagccaatttcaacccaaaaaggaggcaagagcggccccttacttggccgagaccagcgccaccgcgtggacggcgcccgtggacgcgtcccccacgcgcaccacgacgtcgccgcgcgccttgtgctcctcgtcctcgtccgcgtgctgcgccatgggcctcgtggcgacgtccattaggggcggattaattaccacagcagctccgttcccatcaaggcacgcgcttgcggaatgcttgtgtgttctcaggagaagcagaaaagggcccgaaaatgggaactttactcaattaacggcacccaaatatactaacttgggtacgttgggcgtatttttaggccgcgacggtaataagatcgatgcttgaagtgcaagccttgttgctgttgctgttgctgttgttggggcagccaagttgcattttgattcaatatccatagctgctgcagcttcatataacgttaaaaaacctagcacacgccttcggataacccctccgaaaagtcctccgagaagttgcgagaacgccggaagagcacgtcctcgttgccgaaggtcttcatgaagtggaacccctcggtcgatttgtcctcgcccacggtgttcagccgcggagactccgtcgcgaacgccgagtggtttgagtagctgggaggcggcacgggcgacagcaggaagcgaggggacagcggcgcctcctggatctcgttcacttgatgcatgggcagctgctcctcctcctcgtccgtcttctcggcctcggcgggctcctcttcctcctccttgtccttgatcccgatggacttcttgaacttggcgtagctggcttcccactccggacccagcatgttcgtcagcgccttcagcacctcctcgctcgagcgcacgcggtgctcctcgaacgcaggcagacgcacgacctcgtggatgtgccgcatcaagaatggcacgcagttcttcttcaggtcgtcagcgttgcactcttccgatagagtcagcaggtccacgacgttctcgacacaaatctgtccgctcaggaaggcctccgtacgcttctgcagctcgtacacgcaatagaacgacgacgcgcgcagcaattcttcagccacatctggggtaatgtccactttgccagtgtactgcattttcgcacaaaacaaattgttagcgttcgacgtctttagtggcttagacttttcagctgtgaacgtaccaagaaccgaagcaggatggaaaatacttcataactgcagttgtcgacttcaatcactgctgtctggctggtagctgaaccaaactacaacacgtaggcaacaaacccccattagaataagcacaagctcgcagcgtggcagcaacgggatacaacagggtgcagacatgtaaacgatactcactctcaccatgttcttgaagtacgagttgcggaagaagaggacgaccttgtgggcgttgatcggggcgatatggcccttcacaagaaactgcaggtcggacagcgacgagttcaggaacagctcttcgtggtcgtccactagatacggcggcacctcgatcgtcacatccgggtcataccccgccggaaccaaatgttttatagcgtgcgcggcagcacatcgagggaactccgatgttgactgcagcatgtgatagagtaccgaaagcagaccctctgataaaagagtcggcacctcttcggcatccatcatgtgcacgaacgtaagcaaaatgttaccccgtagctcgcctgcatgttcacaacacacacggcaatacgtcagtatacgcttttcctaaatggaataaaaatgtcagcttaccgatgttggcgtcagcagatactcgtgcaaccgcgtgaagcatccgccggaaatcctgtcggttgatctgcttccagatattgcgaagtgcttgtaggcaaatggcccacgtgctaagcgtctcttcaacttccagcatttggaggactgctccttccagcaccatctgaagtgtgctcgccacactgcacgataacgcgcacagcgctcccgcggcatgtgacgatattgattcatcgggatggtggatcgcatccatcagaagcagaattccaccgaagcgagtaacgtagtcgtggttcagaggattctccatcaacgactccaacgcaaccaccgctgttcgcttcttgtccgggtcttcatcccttaggaggtcgagcagatctggaatggagccctttacacacttatcacacaaccgcgcacgcccttccgttccctctacaaccgctcgagacatcgaacagtcgttgcaaataatcacaccacattcctgcaaaagcatatcacatacacataaatgagatcttctatcacacgcaagcagttctgtgacgttgaggcttacccgacagtggtgctttctccgataaaacgtgaacgggttgtggcagcacccacactcgagcgcctcatggtcctcagcccatggcttgatcagcccccacttcagcaagtcgttcgcggattcaacgacagttgagtcaacagagcggaagcgaacgttcaggtgctccacgagtttatcgcctaagtagggtgaagatcgcacagaggcggggtcatacgcgtacagtgacgcccccacctgaccaagttgaaccgagtaggctggcagacgccccacccagctcggtagccccaccttccatggcaaatcgcggccactgtagccattattggacagtatatcgaccatatccttcatccacacgctcctgttgacgcagatgtatcgacctcgagcatcattgttctccaacgccgcaatgtgcgccaccgcgcagtctcggacgtcgatcatactccaattcaaatccaccaaagccgagtattgacccgtaatcagatcgtatatgacttggttcccaggagcaagcttcgacttggacagcatcggcccaaacagagttcccgggttcatcgtgaccaaatcaattcgtcggtcgctcggcagctgatccacgagctgccaagccgcctcctcggccagcttcaagctcagaaaatgcgggttcttctccagcgacgacgtcacgttccagcacgcgtcgttaataatcgaatccggagtgaccgagtcggccattgctgcaacggaagaggtcagcacgacgcgcttgatccgcgcgcgggcacaagcctggatgaagttggtcatcatggggatgatgcagtgcatgcgactgccaatactgtgcaccccgggttcctgctgctcggacagcgggtcccgcaccgagcatgacgagggcgtccctgtgtgaataacaaagtcgcagcctacagcagtatccaaagcacatcagtcagtcagtcagcaccactacagcagacagtcatcatatccaccaccaccaccaccgcacgcaccttggacggccatgtcgcatgcctcgggcgtcagaagcgacgtctccacgaccgagaagttcttgttggcgttgggcagctgcagcaggcccgaaatgtcgtccttgccgttctgcaccgtgccgcgcacgtggtagccgcggttcagcagctcgcacacgatccacgaggccaggaagccgtccacgcccgtgacgcagatgggcttgtcgctcaggttggtggcgagctgcacgatcttcttgcggaactgcagctgcttccagacgctcgggtacatgcactggcggtccacgggccgcttgtgcttcttctggccgcgctcgcccttcttcttggagctgcgccggcgcatcttgggcagcagcgtgggcgcgctcacggccgtcatgccgttattagcgttgccgttgtcgaagcccgcgtagttgaagttgctgcccgtgcgctggttggccagcaggtacgacatggaggaggacgacgagttggtcgagtcgaacgactgcgtggggctgctctggccgcccgcggcgatgacggcggaggcggcgccggccatgctggggcgcacgcgctcccggtgactgctgggggccttgccgcccttgcgcgccgaggaggaggcggcggaggcgccgctcctcttcttgcgcgcggactgcggcggcgtcgtggggctgccgctctggtccgtggcgccgtcctcgtcgtactgcgagccgaacagcatggtggggactggaggatcgagcgagtgactgcgtaaccacccgatggaacggcgcagtcagtcgggggcttgcgtaagcggccagctgcaggacgcaggcgatttccgaagtgccgggtgctggctgggctggggcggggcggggctagaggctgcgtgcgggtggcagcctggtgctgctggtgccgcgagctctggactctgcgagcgagcgagccggccggtcggcgacgttctttccttgtgagctaaactcaggcgggagaggagatttccgcgtaccagatatgtggtacacgctgcaaaaacggaccccgacggtgctgcttcggtttttccgaaacccgcgactggcgccggtcatcatgatgagcaagcccttgcttggacggaggctgcagggcagtggtgccctgggaggcattgctgcattcgctgacccagcctgtgaggccagttgatggagccccgagcgcatagcttccgatctatcgtccgcccctcgccgcgagcagcggaacggcggaacggatatcagcggacaaggcgcagcgatgacatcgagtcccaagcagcactggcagcacatgcgcgtgctgtacccggcttcaaggcagccagcaaggttgctccgctcggctgctactgctgatgctaatggccggcatagagactggttcaggaagcgcatcgctcgacgctcccttcattgacaaggctgtcagcgagcatgggtctctgccgtccgctgtaacgagaccatgtccaccaggcccagcagcagctcgactgcggagctcgacgtccatgacctgcggatcgctcgccgccaagcggcgccatatgccggtcgcttcaattctggcagaaaaggtgcttggctacatttccgctttaccgcactgcagttcggccggatgccggcgcatatctccgccctctcgacgctcaaatctccgctgctgggcgcgctaatttttggcgtcgacgtgttgtgcgcgtccttggtctgctacgcaatgaggccgtgccgaagctgttcctgctgatgacgcgccaactgggccaggctggcttcgctatcccccatggccgccgagaataggcggcggaatgcattctcgctgcccgttgccgacgggatcctgctgtcggttactgcagcggacgccctttgagcctgagctccacgccgacgccgacgccggcgccggcagtctgcaatcggctttcagttccaggagcaagaactctcgcagccatgacggcctcgttcgaggagcacctcatcgaggaagagatcagcgaggagtactcgctcgcgttccagttcgccaccttcctgctcctgctcatggtcgccatcatcctgtgcaaccacgtgacgcacaagctgcactgccacttcctgccggaggccggcgtgaccatcggcgtgggcctcctggccagcatcttctgcatgctcatgaagtccagctccatcgccgtcaagctcatggacttcgacccaaacttcttcttcgtgggcatgctgcccccgatcatcttcaactcgggctacaccatgaagcgccgctacttctttgaaaacatcacgccgatcctggtctactccatcctgggcacgctcacgatgagtgtcgtcgcgggcctcggcatctacaccgtcggccgcttgggctgggtcatgcggctgtccatggcggagagccttaccttcggctctctgatctctgctacggacgctgtctccatcctggcggtgttccaggagcttcacgtcgacccaacgctgttctacctcgtgtttggagagagctcgctgaatgacgccgtggccatctgcctcttcgagacgttctctcgcttcattggacactcgtacgagttcaagcccatgctgttcgccatcttcgagttcggcttggtgctcacgggctctacgatgatcggggtcattttcggcatgatcccggcgttgctgttcaagtatggcaacctacgcagcaatttgctgcacgaagtgggcgtgtacgtcatgttcgcctacctgccgttcgtggtctcgcaggtactcggcatgtcgggcgtcgtgtcggtcattttcgccggtgtgtcaatgaagcactacgcctcggccaacctgaccccggaagctcgcgacgtgtacgtctgcaagttcattttgcatacattgtcaagtggtgtgtctaacagagtaggccatgtttgaatctacaggtgctctggggtcttcaatacgctctcgcacatggctgaaacgtcggtgttcctgagtacgtcaagtgtatgaagttttgccgtggatcacgcctattgtgtagactgacaactttgtcgtgaacacaacgtcttatgacagacctaggactgtccgcgtttggactgacggagtactacaggttctggctcatcttctggatggccttcttctgcctgctgtcccgagggtgcgctgtatacccgctttcctactttttgaacctgcgcaagaacgccgccaagatcaccatgaaccagcagcacgtgatctggtacggcggaatgcgcggtgccgtggcgttcgccctgtccaagtccttccccggcgagaagcgccccgaagttgtggccaccacgcttatcgtggtgctgctctcgatcatcgtaatgggcggcggcaccgtcgcggtgctcgacaagtgcggcattccacgattgaccgtaagtccgccctgcgatatgtatgttctgctcgtttgtttgctcgttcgtcggcgactgaaccgttctgcctctttgtgcggttgattctgctgttcgacccggatggatagcccgaagaggaggcggcgctagacaagacggtgaagccgcaccgacacatgcgcgcgctgcagttcgacaacaagtacctgatcccgctgctgacaaacttgtgccagtacggcgacaacagcagcccccgcaagggcggcttcgggccggagggcagctccagcaacgtggacaccgccgacgagcacgaggctgaggacgacgaagtcgtggacgtcattcggcgcgaggttaacgtgcactaaccagctgctacgcagtagatcgagttggacccttccagataagcgcgtctcctcgcgcgagacactgcaactgaatacaaatgcattttccgccgctcctctcacttgacaaaaggcagcgagcggatctgataagcaaatcttgtcttgcttggcgcagttgaaggcaaattccacgatctttttcattcgttgactgcaggagagcttgcttggctcaacgtttgagctgctgcaaacccccccccccccgctatggtagtcgagcgccagaatggatatcgtgggccacgattcgtggccgatgccacgactgggacacgcatggcgtggcgcgcctctggcgacctcttcgagcagcaaacagcgaggctggcgttgctgttgctggcgtgctggtaaggcggactgcaactcaggggcctgcaagtcgctgattatgatacgctatccgacagccccgcgcacggtaataatcgcgcgggcatggcgccttccgtcggacgggcgaggcactgattgggacactttggctggatattttgccgtgcttggcaacggctcaagcactggtgatcgatcgctgcagcgagcgagcatcaaacgcgaaagcaaagcatcggcagatccctgctgcgatccaaacgctgcacaaattgctcaagcttgcctggcaaactggagcgctccgagtcggatgcagttggtgccgggtgggactggtctatgtgaatatgtgccggggtgcaacagttcagcgttaccgcgaaacctcctttcatcatcgaagcccaaggtgatgcctgcaagcaagcaagcacgaactccttcgcccgccgacatgcgaatctcggccgcgcccccaccacgctccaacacgcgcatggcgcgccgttcgttcgcggcaacttatttgcctgcgatgtgtcaaaaacttcacctgcgggcgcctgtctgcacgggtgtcaacgcgtcgctcgccattggccgaaaggctccgccacgcgccgctccattggccataactgcgtcccgtatttccgacgacagggctagggcccgccgctgcgcgctctctttcactcactatggctttttggctgagtgccattagcctccaacaagcagcagcagacacacacacactcagtggactaattagtggagactcggcacacgtcagtcacacttgggcccgcccgccgccgaatggagtccgtggtcgaggaggccttcgaggtgcaggtgctgcagcccttccacggctggacgctcgagcgcttctgcgaccgcagcggcaacacgtaccacgcgctgacgcgcgcggtactgcgcgtgaccgggcgcgacgaccgcctcaatggcgtcgcggaggcgcccgagctcgaggtgggcgtgctgcgctcgcccgagtggatgtggagccacgcgtggatgcccgacagcgagtacacgcagtgcgacgaggaagggtggacctacggctcgtccatcgagcgcatcaactgccgcctggccgagggcacgagcaaggtcaagcgcggctactaccacttcctgcggcgccgtcgctggatccgcacgcgcgtgcgcacgccgctctcgaccgcgcacgcagcagaggaggagacgagggccggctcgcccagctacaacgacgaccacaacgtgcgcgagtccaggctgtccgagagcccgggacccaacagatactaccgcgtctatcgagacgcgctcaaggcgtacttccagctcggatccgcgaagaagccctcgaacttcgtgcgcgtggactttaccgacgacgatatccagaaggagggatggctcggggtgcgcggcacgctgtcgcgcagctggaagctgcgatactttttgctccgatgggactccagcagcctcgtgtgcttgagagaccgagcgtccatggtgcaggtgtgcgaggagctcattgacaggcatacgacgctgctcgtggaggaatcgtccaagcctcgacagttccagttctcgatctgtaacggagagcggacgctgaggttgaatgcggtggatggcacgtcgcgcgcgtcgtggatctcggctctcagcgagctgatcgtgcgcagtcgggcctcgttttttgcagcggacgagtcagaaagtggatcgagcaccaggagccgcagtttccggcgaatgcgctcgtcgacggaggaggacggctcgctcgtgagcgcctccatggtcaacgagatgaacggcgaaatcaatggagccaagaacaagcagggccgcggagcgtggagaccgtacaagttcatttcgtccacgatgcagtccaagcgcaaaacggacgaagcctgtcgtcgagactacgtgaaacagttcactgaggtgctggactcgaagatcgaattggcctcggcgtatatatcggagaatatcgacatcttggaggaaaatctgtgcactgcgcaggagtttctaccgtcgacagtgccctccgtgcccaagaaagaaatcgaacggcttcgaacggaggcgtctgcatcgattcaggcgtttcgcgtaggcgcggaggcaactttgggttcggatcgcaccagcgtcctcgggtgcaacatgctgctgaaggagctgtatttgctggtgcgtcgactgcaggaaaatgtgattttgttggcaccgtctcaggaacacgcgaccatcaagaaaattgttgccgattcccccactaagcgtcgaatccccctcgactggtttacggaaggtccgcctatggagaaggagcaacagcaacccagtctaagcgaagacagtgctctctctacaagcacgtcaaactccaccgtggggaaactggaattatcgtacacgtcgggatcttccctggagatgaagagaaactctctgattgtggcaaggcacgacaagcgaagtttatccgtaccggagtcgaaccgctcaagcagcactcctgtcagtcactatggccacagcttgcacgcatccgaaggtattcggataaagccgtacacgaatattccgacaggactgcgtgagggccacttcgacctccccgacggtatcaacggctacgtggtgaaagtccacgacaaagacatcgggtcgttgatcggatatactctttgctctactgcgtatattgatcagctggaggcgcatttcgagaaaaaggtgaacattgcagaagagctccacgcatcggaaaacgcaggtatcagtgaagtatctgcgccgtcaccacccaagaccgaagaagtccctgaaattgccccggcagcgggaggggatgtttcacccagctctagcgcctcgacagctgcgacctcgatgacggtggttgacaagaagaaggcgatttatttaaataagctgcgctcgacggatctgcaacacacgtcgatgaagttttcctatgcagttggctccacgaaccacgagttccgctgcgtggcatacttcgctgcacaattccacgcgttgcgcgcacttacagtcccgggcaatgtggagttcctgaactctattatcgagagcaagcggtgggatacgactggaggtaaatcgggcgcgttcttttcgatgactcatgataagcgctacgtgctgaagggcatatcagtgaccgagttcaacatgtttgttcacatggctccgaaatacttcaagtttatttcgcgagtggtggagctaccgacgccgacagtcatcacgaaaattgtgggactgttcaagctcaaccacagtcggcgcctgctgaagcacacggaatacgttgtgatcatggagaatttttcgtacgggtaccccccgggccaaatgtacgacctgaagggcattctgcgacggcggtacaacacttccagcagcggcgacgaggaccaccacgatgccttcaacagcgtatcgaatgtgcaagtctccatgaatttgccggtattgctcgatggcaacttctcggagcgtatgcctgtaccggtctcacgcccagacttggacgtaatcgaagcagctattcagaacgatactggtttcttgtatcgtgcaggtgtgatcgactactcactggtgagtgctgcttgtgctaccggtgatatcgcccagtgtactgactctagctttctttctttcgtttagttgcttcgcttcgatgaggaaaagcgacaagtggttgtggggcttatcgactacctgcatcaattcgactttttgaagaagatggagtcgacatcgaaggcgagcttgaccttccgcaacccgacggtcattagccccatttcgtaccgccggcgcttcatgaacgcgatgaaccgctacttcgtcggcatcgagaaggagatggagatgcgcatgcgcaagcgttgcggcttcaagccaggtttgcatccgagtgcagcactgccttctgtgcccagcacgcgggcttcaactgcaaccgcctcccgaacggacgaggaaaggcatgcggacgtggcagcgcggcttgccgacaacatgtccctcacgagcgagtcttcgttgtccgtgcgcgccccggccaaatcggaactccacttgcccaagcttgatagcgactggagcagcacgaagccacgcggacactcgttgtcgcacttgtcggaccacgaggttcgctgcgaccgcgtcacgcacagcgagggcgagtgcaacagctccccttgcagctcgtcgagcgaatcggccaagagctacccggccacgccactcaacaacaacgtgattttggaagagcacggctcatgacaacacgacgccctcgggcggatgcgcaattgttattgacgcgggattcgcctccctcggtggaagccgagttttggcgggagggggccccgagtcgactgtgtagtatcagaggaatatgtaggagaggctgaggtgtacgaggctctcgataaacttataatcagcttctcacccgcactcgctcgtaggcgtcgcttgtagtggcggtggcacactcaaagcctccgactgcacggagataaaaaatcatagggaaggccctgcttgaagctgaagcagtgcttcagaatctggagatgagcccgggactcatcacttgggcttgagccaggcccatgtctccttcccgcgtcggctgaagtagcgagcgctgtggcggaagcttgccagtgctggtgcagcaaactctgcaagttaaccgccctcagcccccgagacttttgaacaagtgtacatacatcacgagcaacccattcataatcagggatcgacgagcatcggcttgtcgagccaaagctcccaaacttcaacggggagccccatcaaaacgatcgttcagtccgcatgactcagatgccagaccactcctccaaaagtgcacgcggtgccactcgagacgcaaggcccatgacttgcgtctcaaagagcagattaaaattcgtcgagacaggatcatgaagtctgtgcaattcgaagggcgaagtgacggcttggcttacactaagcgtggttgaagatgtgtttgaacttcttctccgcctatcacaaatattgctagtagaactccagcccatactgtacgccagtcaacacgtgaaatatcaagcaagctgacatgatgatgcttccgctactctcgacatgttgccgttgttgaagctgccgctgccgcaccggctcacccccgcgttaaatgccttgcttcaacgtgctcgccctgtccattgccgacgaccttgagccgagtccaccggctagctcctatcaaacggaacgccctcgaagatggaggccaagtgcaagctgcgccgcgccggatctcgcggacgcgcatcccctcatgtccttcagccagcgtcgagcaagctcccctttagtcgctgcgaggcctcagctcatttcaacttttgcgctcgagggctaaagtggaccaatccccagtcagccagccggtagctagctcgctcgctcgctctcccgtgtcgtatcgacctccaccacagccatgccatcggtgaccgactaccaggtggcgctgacccccaaggcgtcgtcagaccccgcctcggagccggtcaacaacgacgagatgcgctcgttcggggagtactgccgcacgcgcttcacgacgctcaagccgcccatgaccaaggtggacaacccgttcacggtgctggcgcagctcaaccgcatgcagtggctgcagttcctcgtgtccttcatcgcctggtcctgggacgccttcgaccgttcttcaccgtgtccatgacggtctccgacctggccgagaccttcggcaagaccaagacgcagatcacgtggggcatcacgctcgtgctcatgctccgatcggtacgtgcgtgacgacttaaccgcaattagtcgcattgttggttttaaatgggttggtgttgttcctccttaaaatgggcatcatttaactttgtgtgtttctccttccaggtcggctccatcatcttcggcattgcttccgattgctatggacgcaaggtgccatttatcgtgaacaacctactatttatggtccttgaactggcgaccggattctgccaaaactacacgcagttcctcatcgtgcgcgcgctcttcggcatcgccatgggcggtttgtacggcaacgtcgcggcaacggcgctcgaggactgtcctcctgccgcgcgcggtattgtttcgggtatgatgcagcagggctatgccttcggctacctcttggcggtcgtgttcgcgcgcgcgctcgtcaacactcaagccatggatggcgtccgctgttctggttcggagcctgcccgcccgtgttcatcatcatcttccgactgtacctgcccgagaccaaggtgttccaggaacgccagcgcgtgcgtgaggccagccgcgacatgaccaagacgttcatcgcggagggaaagatcgcgctcaagcgccactggctgctgctgtgctacatggtgctgctcatggccggcttcaacttcatggtacgcttcacgctattgcacccgctcgttgagcacagttgattgacgctaaccatgaccttgttttgtgttgcagtctcacggctcgcaggacctgtaccccacgatgcttgagaaccagtttgagttcaactccaaccaggtgaccgtgacccaggtcgtggccaacttgggtgccatttgtggcggtaccgtggtcggctactactcgcaagtcttcggtcgtcgcctgtcgatcctcgtcatggccgtcgtcggagctgctctcctctacccgtactgctacgtcagcgacgagaagatcatgatcgccgccttcttcgagcagttctgcgtccagggcgcttggggtgtcatcccgatccacctaatggagctgtcccctccgtcctacagtgcgtttgtggtgggtacggcctatcagctcggtaatctggtttcgtccgcctcatcgacgatcgagtcttccctcggcgaacacttcccgctgccggacggtgagaacggagtggcccggtaccagtacggcaaggtgatctgcatcttcttgggtgttgtgtacgtctacgtgttcttgctgacgctcatcggacctgaggcacgtggaaaggagttcgatgtcaagcacgaccacgatctggaagaagctgcgcacgtcaaccacgaggatctcgagcggatcatccacggagacgacatgacccccactggagccaagtccatgaaagtgtaagctcgcgattgaaactactacgcctcgatgcgtagtgctgtatgcaataatccatttaacgtgtagtaacatggaaaggttggggcaatttattccgctgcttaaaagggttatagtgcaggaggtgtcccgagaacgctaggccccaggtgcttgacctggtggcgtatactcgccacagttcaatttcacgaaacttaaaggaagacacgaatgcattctgaaaacgttttgacaaatactacacctttgcccggccatagttggcctaatttgcaagcaaagttgtcatgaatattggaggtaccagagagtaacattacattccctaaagtatgactttcgtttcattcaaagttgtctaattcccaccaacgactgttgacgtaatacacattttccctcgcaaactcaagacctttggcgtacaaaatagaattagctaagtttttcactacgtagtacaaaagtttttgcggttggctagtagtaaactcttccagtaaactaaaactattcatttttactacatatgtatgtagcataatactgtgtaagagtaaaccaatttcgtgaaaaacttaactattcgtaatttgatttgttttgttaaaaaaaatagaaatacgaataagtaatgactatttttagtatacggggagagtttactactaacgtaatcctatttttcgttttttacaaaacaaaaaaatcaaattacggattagttaagtttttacaaaattgttttactcttgcacattattatatatgtagtagtaatgaatatttttagtttactgggatagtttacttctagccaaccgcggttaccgtacctaactgacataatacttttgaccttttccttagcattcaaatactgttgaaaagctctcagcggcttcaaaatatattgtttttgaaagctattacttgcttcgtttttttttctctttcgttttgttgttgagagccagcaggtacaagcgttgcgataaggtgaatccacattttgattttaatacaattggctgagcttgcaaccactacccaacaggtaaacatcctttctgtgagatacggtagcaatgattgttgggtagaaatgataagttttgctaaatgcatattttaaattcggtagttgatactaacaatattttggtgtaaaaacacccaactagatcaatcacctggcattaagcaacccagtagatttcgatttctacgcatttgagatctagagctgctttatatacactcgattctaactaccgattgcagactacaatattgtgggtgctcagccagcaggcacagtcttatagttcttttttataagggatgttttccgatctacatcacactttgcgcggtgtattgatttagtatactgaactcgcctattccaccagtccgcgacgtctataagaaaacgttccgccaactagctgttgtaaactgaatcacaaggaaaactttgtttcccaccaaagttggaggtagctcttgcatgaaagtgacggcagaggtgtggctagccagagctgaggctatcgctaacctctcgagctaagcggaaatcataggggacttctgcagacacgacgactcgcaaaaaggcgacgggtctcaccgttcgacaaaaggttgacactatcgggctgatgggaaatggtgcaccactggaagacattggctagaaatttgggatttcccttggacaggcgaagcagctgcagacaacgaaaacggatatcctcgagtatgctagcagcgcggatagcgttgccctagataacactaggcaccgttctacgacagctctcagtgctccaaatagctaagtctcattggacagactaaagtgctggatcgcctgaatgacggagtagagcaatgcaatgttgccaagaaggttgagatcgaggcaccgtgttcaagaccaagtgacgcacggatcgaattccggagttcgtcagcaagaccgatgaagcgtcagtcctagcggcgaccagactaccgcgttgaaggacatcgaatgatcgcaaagcgcgaactctgtctatcagcaaaacgtttgatgccatttagcactggtagacagggaactttgtcggatgttgcgaaatgccttggcatccgtgcggggaacctgcaatacatcaacgcaaccaaggagataatattggactttgtgagtgggtccgagaatatcgcggacctgcgcaaggtgaagcttcccccacgcaatcgataaaagattgcaagccaccgacccggttgtcgataatacagaaccgagcgacacggtgctacttacgagcgtaggaggaagacgcccgtgataccacctcaattgccaggcgatggccgatctggcgcgatgtaagtcgtggtcaagggtgcatgcgagctttcgcgaagttgaagtcgcctaactgcatgtcgtggaagaaacgatagtctccaacctagactatcgtttctttattattatttgaagttagtcgaagatgaagttgaaatgatgacatgcatcggctaactgaattcacgctttgaaacagtttagtggggaatcaggatttcaattattaccggtaaagatcgtaaccataacggcgtagtggtatcaacagctatacccagttgctcaacccaacggatgtcaaagctgtgactccgtttgtcgttatcactcaaaacgacatcgtgatgctgcatcaatggcttattacgctgtcatagacagatgtgactctgcgttttgtacttgtggctgctggaatcactcgccactgaaattttagcccacgcgaaatagtctgaggcagttggggttgctcgacaggatctggctgtcgccctagtttttgattctggctcagcgacgatggcgcttcaatttggtgaccccaatctatccacacttgctgcgggtgagtcgctgtagggtggaagcgttttgataaagaagggaacatgcagaatacactctcgtctttaaaatacttaccgccctctacatgcgcaatattttgtagctcaaccaagttttgtccaattccagcaaggagaccgaaagtaaccatcccttgcttcggcgcgttcattggtcaagttacaccgcatttcagcaaaggagtggccaatggctttcgtgtaaaaagtaccagtacgatatgcattctgaaagtgttcagacaaatacaactgcaaattgttgttactactttgttagcgaatgtaaacggatccatccatccgttttgaatagactcgaatcaggcccacggtgaccgaatttaagccggatcatatccgtttggcatggaagtacattgggcaaaaccaatggccaattgtggtttaatctttgtatattttagtttcgacttattgacttgatacgagcatatcagcttgccgaggacgaaccggagcaggatggtcttgaccactacgcgggatccgaggatttcgaggtgttagccgtctgttaggctgtaatacaacgtaaggcgcttttgtcgcagtgtgccttagttgagtagaatactctcctgctccaagaagcggtaaaatgcgtctgtatctccatactttaccccgtacgttatggcgcctgcgtatggctcttcaaatttgtaggtcaacgaggtgcggttcacccaggtgaagtgcggcccgaaaaagttgaggaaacccaacccagaggcagaagctgtagcaccccttaaatgtttattgtaatacttcataaacggcattggttccctgaatttttttacatgttcacaaatggagccatctccacatgaatgtccgaatcctggttttcagcccatatccagctcagcttgagcggtttccccttccactgaacgaggtagcacctataagtcaggggggggggggcaggtgccacgtcaacagaatacaactcttttgcatcgtcaatttttttctagatactcgtcgcgcttttcagggaagttgagtgcgattgcgtcaccggtgtcgctaaaacaattgtagcgtcgctttatcataagttatttctgcacccttagaagtaccttaagtgcctagatcgatcttctttccatccacgtaaatatcggctttgacatgcattccatgaatcgtcactccactatattccaggtttatcacctgcaccgcgggttctgggtgctgtggctgcactgcgggcatcgggcgctggtgctgcactgcaggcaccccgttcttggactgcgccgcgggcactgtgttcatcgactgcaccgccggcactgtgttcttggactacgctgcgttcttcgcctgcgccgcgggtaccgcgttcttggactgcaccgcgggtgcgggcactgtaggtggagcgcagacgaagcttcaaaggaaatccttggtcgtcacggaacgaaagtgaagcctgctctgtgtcctcgtgattgtaatatcgcaaatacacggttgcaggctggtttcacacgcgcttctcccagctctcgtgcggggatttacagtgcgggaccggcttgctgatcgtgtaccttttggtcagcatgaccccaaactcgaccgagtctggatcttcattgaagtgatagccagtagattttcgttggaagcgcgcacttcgaactatcaccgtggtcctgccacgtagatgctgcgggacgatatttgtgccgtacatacgctgctggtaaaactctctgtattccactcgtttgaatgacagctcctcgtagcagttcatcgatcgaccatcgcgcgcgtcccggccgctaccaagagacccgagacctacttcctcttttgctttaggggcaggaagtgagacgccaaagaacactgccgggtacgcattccgatttgacgcctattcttgtttgctcggacagctcaaacgagggattaggtccagcaaagctttcccgtcgatgtctaacactttgtatcccgacatttgaactgggttgttttaggagtgtgccgtgtctgagtagatttgtgcggctagctccgccgcagccgagaaaacagagtttctcttccaagctagacacatgagtgcatggtcatgcggtgcgacgggctcattcgaaactggaacaggccttttcgtactccgatcactgccgactccatcgtacaatcgcctgggtggcgcatgaccacgacctgttcctccgtgaagatcaacatctcgcgccatatgtccatggcgattttcagagggcacgtgagcctggggttgcgcgtctgcagcccgaactacacgccgtcttgcaacctgaactccgtgctctggacgtccggctcctgcgcgcgcgtggcccctcgggctgcgctgctacggcgtctgcgaggagcgctgcggcggcgagggcttcgatgaccacggctcctgtatctgctccgacggctccggtcacccctatcagcacgccaccatgagcgtcacgactatcgcgacatcggctttggctccgaaggttccggccgccccatgaggctctctaccatcgccacgacgaacctccccaccacgccaacatcaacatggtcacggggacagcaaccgatgccccaaagccgagcattaccactgtgtctgcgactgcggtcgcggcccagatcgccgccaccgccagctccagcttgtgcatcgacgtgaccgccgctaacttcagcttttgcgcgtagaagcacatgagagaagtcggcattttcggctttctttcgcaaaaatgtaccattttggcgggattatggataacacaagacggcattttagaacattgtctatggcacagttgaatgcactttgaagatatcaacgtgacaataatcagataaaaatatttattgaaaagcataatgtacttaaccccttggacgcggagggttggaaagtcacctgttctgaacagcataagaaacacttgatttcactatacctctaaatccacaaaaagtgattatcgtcccttcccatatctagcctggatatcattggtccacgtatctaaacgtggccatttgattgggcatcaagaacatatgactatcagggtagtttaactaccacgcacaagcacgaaaccatttttcagaaaaatcaaatatcggttcccctctcttcttttcttcatttggcgcagcaagagacaaagtggcattttgggatgacatcggcgcggtggggctgcttccgtgcaagccccagacggacgagaggctcggtacgtgcgctaagtatcttggtatagatcccaaactaactattgcgactatcgctttgaagcacgagctacttgaagtctgattgtaagcaccgcggcgcaagcactccctcctttcgtgctgcttggtacgtgtgggcacaacttctgctggttcgaatacatgctaaccacttgcgtttttactaattgctaacagaactctatgcgtcatctttgcctagcgcgactgtgccgcgaggtatcgtcatgggcgttgggacgctagaggtatgcgttgcatcgttgggatgattgctgcaattggactaacctttgttgccttcagtaggcggtcgtggtaggatggggactcgagtatctccaacaggcgtcggttaccgtgaatgtccatggcttgctgacgtggaaagtatactatatgcgctttatgctgacggaatggcttatacggattgagattggtttctgcttattgaaatgttttacgaagatatacatggcgctggctgttgggacgacgacatgtctacatgaacgacaggtcaagagcagcatcgcctccggtggcaacgtgataaatgtttgagtgctgcccaagaacggacggcactggagacgagctgaagaggagcctgctgctcatattgaggtgtcgaccgccgctgaagtaaggaatgttgtgggcttcaagttttacattcaagatgagaggacaccgattttgcgttgaaggtatgggtgaaagttgatttctacttgaatgctgacttggtccgcttacaagtttgactttatgccgacaggatcaggacaggatgccttctggcttcgaaaccaagtcacatcctccacaaccgtagcaatgcgagtcacactatagtgcaggaaactagcaagtgaatatagttcctctcctacattacattgcaatatgtctgttctcatgttgctcctatcttgctcacacacataatttatactgttcgactgatcgaagtgtggtgcaatctctgattcaatgtcggtgtgcgaagacaacatcaacttactctgtagttgctcttcttcttttgcattgtttggtagcgttggagcgcgctgattgtaatgtagtggggtcctagagggcttatcacttgtagcaaccatcaaggcgacaattcatatatattacatgtaagatagagcggaatgtgtacccgttcaggcgtaatgtttctctaaatatcagtattgcatagaaggcactgtgagcagctcattggaggatttttatccgcagatcacaccagtcccttctagcgaaataattaccagggagcttagcaacaaactgtgtgaagaaaagccaaatttatactcgcgttcactatgtcatactaagtctcatacgatttcttatgccgtccgggacggtttaagcgttttttaatgccgtccatgtcacccctccgcgtccaaggggttcaaacgattaaaactgagacatgcatgtcataaaaaatgcatgacaaagtcggcgtttttgtagatacgaatgagaaatctagaaatttcgagatcaatattttcgagccaacatcgaatgctttttctgttatatacggtacgtatgtaaaccggttgcatccggaatccgtgttacgagggctccagatctgctcgtcaccactgcatatcatgcatttatagacaccggtactgagctcttcgacgtacttgaagacaccatatgcgttcttgcgcttgcgtttctggtccacggagctgacgctaccaacggcaaagatggatggccccatggaggacaaagtggagacgctatcggtatcgacatccatgcttgtttcgtgcgtaacaggacttgcgtgagcggacttgacgcgttgtcggaaagcgcgggctcgtggttatgaaagaaggtgaggggctgtagggacagaattgccgtagtgatctttacgtatcctgaaaatgctcatcgatatcccaaagaagttcgagcctggggtctacgtgacatgggcgggtgacgacaatattctgctttgcttcataaggattatcgacgcgaggttagactcaattatgatactggacgcgtatcgagaggccgctgcgatcgaaaacctaccgaaacgacagggtttttgccaacttgggcgtaatcgcgtcccttctggaggctgtatgccgcagcccctcagaagtgattgacagcattagcgggcagtagttcatcgatggggaccttcgccagcgggtcgcaccagggcattcggaggagaatggtgctggagacgtactgccgatccagcaatcgagagaccctccacttaaaaatgcaatgatactgccaaacgacggcgtattatccaatgacaacgtgaccctgattgaggctatcgagaatgtcgccacggagtggcataatcgactacgtaacgggcttcaagcgtcccgaaaggcaatacaagtggcatcgttaaatggtgaggctgtgcctaaatcggtcacaaaggttacgctgcaccggctgtggagtcttggaccacttgaccccatcacatatccacatcgcgttgtgacgaccagcacaacccccgggcggggatgggcaacaggggaagggtatacataattaccgcttgcattcaatacgagtttggtggctcggatgggtacttatagataacgaaaaatggatgcacgaaccgtaatttgcggggaacagggagagaagtcgcgacagagtattcaagatactgctctttgtgctgtgttcgatgcgtgcttcacacaaaccacccaagggcgtgcgagaagatgttcaagctcacggcatctatcttagatatactggttacaatacacgatgagcttggggtagatcggacggagcttttgtgtagatccccatcccagattttaccggcacgggcttacctgctcttggtagcactcgcgcactgcccaacctggtcagcaattgcagatattgactgcattgtggcaaacgcagcccgtgctggttccaaagtaccaccggtctcaagagtcagtgacgatggagaggtgatcgttggtgtgcaggaacatgtggaagacgacgatgccggtgatgaacccgttgatgtggatggtttcatgggttcgtttgaaacggcgaagggcatgaaggctttccgtgagcatctggaatctctcaatgaagatgttttgaagttggcatgcctacccttggtcttgtggtcgtgatcggggtcaaaactgccgaacgaatttggttgactaagctgatttgactgaagaagaaaactgaacgtcactagccatgttcacgtgcgtttgcaggtagccgtgaattgcagcttatccgttgccttttgcttcttcgcctggagcgcaatctgcatttgttgctccattttctcggagtgatgtgaatccaattgggcatggaaccatttttcgtgttcaaccctaaccgacgcgaacgttacacactgctgttcgagctctgcacgaacatacacgcccatcttccagattagtcaacgtggggagctctgtgttttactgggaacccgaaccttagaagtcgccctgtccagcctcgactttaactccgcctaggcttgttcttggcaccacttgtctacatccgcgcggatttgcatgacttgctggtatgcgagcatgatctggaaattagtttcttggtttccatggaggagctcgatctgcaacgagtgttcctcgattgcgtcccgcccacgtttgatgcgggtgttttgcttcctcaccttcagcaaacagcttgactacagacctccgatctagtcctcgcgctcgaccaagtgcattagtgaaattacacgacggacccatgctcaactggttattactcaaaaacaagcagctgagagtgcgaatgagtaaactggaagacgaagtgcaggggataaagacaacgaacgagcgacagtgcaaacaggtcgaccattcgcagaagcaagattttattgtatttacagttgcagactgagaacgccaagacgggacagcgcaagttgtgctatcgtcactgaaccagtatcaagcgatagggcgactgacagatactgtcgagcaattctaactaccccagatagcccgcaaaaagtggttccagcaactgcaagttcaagatcacagtcgcagccatcaatgccaaaataagaagcaatcaaggcagcatcaatacgtctttcgaagcgacaacaacaagcaacctcacggcattggtactactccaaacgtaaattgagttaaccacacgcatgttatcggcccaacccttccgacctacttgaaaaattgaaacatagtagcgtactcctagcctaacttgggccaatgcaagcaacggaacgactttaattttacgcaaccaccgcttacaccacgcaagaatgcccctcgtccgcaaattaaaagggcagcatgggcaccagctatggcatactactgaagactatcgagctaagtggaagccatgggggacattctgtagacacgacggcctgtggtccacgaaagcgacgagtctcaccgtttaacaaacggtcggcggtatcgggctgatggagaatggactgcaccgggagatagtacccaggaattcgggatctccctggggcagaccaaacggccgcagtcgacaaaatggctatctctagcgcgaagagcgttgtcctagataaccaggcgccgttctgcgaccgccgccacgattccaaaggggctaaccacccttcgacagacgggggtgctgaatcggccggaggataaagggcatgaaacgttttgctgtttggcaagggatcgaattttgggatccttcgatggcggtcaaggtggcgtgtctgatcgccgctaggattgccgcttcatcgatcctgctgacgaaccccagcattcgatccacgcatcgctggatgttgagcacgacacccacctcgaacccaaacgccttggcaagattgtattgctgctattcagcgggaggatgaaaaagaaattattctgaaccgccattctcaagtcccctgacagcagtgcggggaacctgtacgtcatcaacgcagacaggaagaaaaaattgcagacctgggctggataaagctgctcccaaacaacagataacccgaccgggttatcgatactacatatccgggtgacacggtgatagttacaggcatgaacacggggtatggaagttcgaggagagacggcggccgttctcgaggtagcgcaaacggtgacattcgatgtcaatgatcacactacggagccttcggttttggtggaactgcagcgcgaaggaattgtaactgttttctcagcccccccaagaatttatgtggagagtacacaacgcatagaataatatctggctatcgctgcgcagatgggaagtaattacacaaggatgaaggtactgggcggacagcacgtcaacggttgggaggtcgatattgccctcgggtggtggccgtgcaagtaccacctgaagtttgttaccgtatatgaccgaaaaaagcacacgacaaaagtcggcattatcggccttttttcgcaaaaataacaaaacctggcattttgccagtttttacatgacacaagcgcccttttgggacatccatgatgacacagcaacaaggcattactagggctttgacatgatataattcggtaaaatactatatttcatgcacattctgataaatagttgtaatacttaaactacacatacaaaattcaagtaaaaaccaatccagacagcacctaaaaatgattaaaattgggatctgcaggtaataaaaaggtcatgacaaaaatcggcattttcagcatcgagaatgccaaaacagggcattttcgagacatttagatgcctgcattttcgagcaagctagcgaatgcttttttctgtcatatacggtagttgcgttcatgcattggttgaactgagccaacgcaactatttgagtcccaacagcaaacgcatgatggttaaacccgatcagaagagggaaagcgatcagggtaccacccgctcgaatgacccagcgctgttgcagcaatagttcatttggattctttatttcctctttcgcaatggtttaacgcccccattcaccatatccattcttcacgcaatgttttgtactcatacatgctcagcatacatgagattttgtaggggggaggggggtaatctttaataaagagtcgtacgccaacattgaaattcatgggctgaaaaggagcgcgccggtagcagggcagttcatctgtattccaggtttgacgtcgcgtcctcccgttagaacagagtcgcatcagcactatccaggcatgggaagcttaacgtattcgtttgagttcatgttgatgaagacatgagtgttaagtatcattgtaatggcgtgccatggactcgttaaccggttttgatgggactgggctcactagacagccgctaagaagctagtttgaggtggtatatccaaggtcttgccgaattactcacggtctgtgtaatggcccctagttacataagtaggcagattaatataacataaagtagttaattccgtgtactggcggtgaacgtggttggctgaagtggggaagtcagtcatcatttcagctaatcagatgttgacctgtatttgagtggatcacatcagcccagggtagccgccctggccctaacacaaaaaaagttgattttacccacgcctgactgcttggtgtcactcaattcgagtctaaacttcctcattggtacgtgtaagctagggacgggcgcacaccgggtccgttaccgtctggctccagacgaggggcgtcagggccttcgtcacggttgtcatttcggcattggtgataagcatcttgatcagcgggtcgacattgctcttcaatcttgcagatctcggcctaggcaaactcgccctgacaaacgaaagtatggatatccatgactcaacaggttttatatgttcggagactatacttggtctcagtatacaattaccctagtcctatacggaaacacggattatacaccgtttgtaacggggtacacgagagtgacccgaagggttacgaagtgggtacacactgtctaacctaaatcagtgagagaatcagtacatggctttagagccactgattgtgcatttgacttgggttcactatgctagatagtgaactggatacatttacaccgtaggcgcttggccgcgctaacgagaaatacattcagtttgagattcacacagttagttaagtgttgactcttggagtccataaggtgtatggagtcgtacgttctggttagaacggactatcttaagctgaaactatgtgagtctgttacgtcttcctctgaggagaaagctacggcagccccgctgctcttggtagcacttggtagcacttgtagtcaatccgacacctgggtctgaataggctgacgctctgtggagatggagcagttcgctcactttcccccaaaccagcaggatgcgcttaaaagcttatgtccttgctgagcccggagggcgtgacgcaacttgcgccccgacgcggtgaatgcgcgtctcaaggcgttttcaagctacgagaatgctcttctagagcacagcaagcagaggatggcgaccgccagggcgccccaagcgcccccttcgtcgtccgacgcgggaacaagacccacagaccttcgaaggcaaggaggatcaaagcttgatgctttggacccgtgggggtgaaatggctatgagctcagctctactccggtcggagtcgcaatgcagggcactagctatctcgcaactcggtgggcgagcgagagtgggcactaacgtccgggacgtcggtcgaggtggccttcccgacgtgagaccagctgaaacagctattgtcccgagtgtttgctccgcctaacgaggcgtatcgcgtgtgttcacgcttcctggctactcggcagagcacgaaggagttagtggactatgtccaagagctgagagctctcattgcaggaatatctactgacccgttgccggaggcagtcaccgtcacggtgttcatggagggccttcgtcctggcaacaccagggcgaaggtgttccgaacccacccgagcttttataaagaggctgtgagcgtcgtattgaatgtggagcacaactttaagtcgtcgagtcttgggtggaatgcgccttacgctagctcgtcgaatggtcccgaacccatgagcctcagctaagctgaagacgaagaagccgagcttcgtgctgctgagcggcggcgcggtatccgcagatgcttcatctgtggtgacacccgtcaccttcgtgctgggtgcccgctgctccatcagcggcaggcttcgtcaagtcgctcttcgagtccgagcgaaggctctggttcgtctcggggaagcgacaagtccccgttggtgcgggtcgacctgctggggaagaactaagttctattgaggctcggcgaggtggaggtcgacaggccttagccccgaagaaaaccgtactctctaacacggaacgtgcatgcaagccgggcttgctaggcgtccaagcgtttgtgaagggctttgcgaagccatggataattttaatcggctcgggagcgtcgggtaactacgtccggtattctacgatgaacgaaagtcagtattacgctgaggcgctgatagcacatgggagtgacatcattactgtccgtcccgcgacgagcactcgtgccacggtgcctacggtccctgttgacctgggcgtaaagtttttggatttcgatagcgttgattgctatctggtctttgaccaatattcgagatataatctcatccttggtatagcgtggctggaacgccacgagccttggatagattggaggtcgaagacccttcgtgctacgcacttccctcctggcggagcattggcacgtcatgaacccacctctgctaggaagcagaagcgcttcgggcctggcgggagcactggaccaagtcggtcaatgcgctgggcatcgaagtttccgagttggtggacactgattgtgtcgagaacgagcgtttccagcgtggctcgcggacgacagctggagcggcacgaattccgctgagcgggcgtgtgcgtgtgagggcgatgctctgctgcgtgccggtgaaggcgcggtcgacaggaaggcgagtgaatgggcgttgcctgcatcaaggatgtggagcggcactaattccgctgagcgggcgtgcgtctgagggcgacgccctgctgcgtgccagggacagcgcggtcggcaatataccgaaggacaaggggcctgcccggatggaggtcgtggagtggcacgtaacacactcagtggaggctgcatgtcgtgcgacgctttgctgggtgtcgataaagacactggagctccccggcactatgggggcgctgaatgcgcggagcggatcggcgatcctgaaggacccgtcggatcacttgtatcaagtggtaaaggattaccaggacgtggtatcgaaggagccgccctcggggctacctccggatcgaggtgttcgacacgaaatcgatctcgttccgggaacgaagtacagcgtgacgaggcagaggcccttaccgaaggagcagtgcgacgtcattgatgcgttcttccgtgtgatgcacgaggcgggtgtggtgcgtgagaccaagtctccacactctacgccgacgttctgtgtcagaaagccaattggcaagtggcgtatcgcgcatacttttaacaagctgaatgccgctaccatttcggcacagacgccgattcatcgaaaggatgttcttcagaacaacatggcagggtgtacgatgtacagtgcgctcgactgggtcgatgaatattaccaattgttcatgatgacgagcgacattcccctctctgcggtgagtaatccgagcggcatgctctgggagtagttggttatgccaaaagggctttcgaacgcgccagagacgtttaaccgtcttgtgacgcaacggttctggccccgtcgggcgtacgcacaaacgtacttcgatgacatctttgtccagcgtcgtgcggagcacaggaagactgacatagagaactacgtggagcacccccttgctgtactctagtgcaggcttcaaaacaagttgtacgccaacattgacaaatgcatcttcggagcggaagagatcccaattctagggtgcttcatcgggaagcgtggcccgagggccgacccggtcaaggtcaaggccattattgactggccggttcccaagaaccagaaggatcttcgcaagtggattggcttggccaattacttgcacaagtacagcaagaactacgctgagatggctggtctactctccaatctcctgaagaaggatgcggagtggtgttgggacaccgagcatcaagatgcgtttgcggcaattaagggcagtctccttcatgcgcctattctggctttgtcagaccccacgcatccgtttagtgtcgtctgtgacgcctcggtctttgtcctcgactgtgacctactgcaagctggcgccgcggtgcgcgagcgtgcggtggccctcgaatctcgccggcagaaggccgtggagaataactatcctgtccatgacaaagagttacttgtgatgaagtacgcgctcgtcaagttcagggccctcctgttgggctctcagccgttcgtgatttacacggatcatgtgtcgttacgcactgagactcagtcgcctcacctctcgcaaaggatggcccgttggatgtccttctttgcggagtacaagttcgaggtgaagtacaagcctggcaggcagaatgtccctgcggacgcgctgtcgcgcaggccggattattaactggctcatgtgtacaagtggacgagcacttatgtgcgcacgtgcgagacgtgtcagcgagtgaagtcgtcacctgatgccgcagcgccgttggcgagtttgcctgtccctgcaggctgctggcaatccatgagtattgactttgtatttggtctgccggcggatgcggcgggcaatacaggagtcgtggtcttcgttgaccgactgagcaagatggctcacattgcagctgtgccggataccatcgatggtaaaggtacagcaatgctgttcttggaccgagtgtttcgacaacacggactccctgagtcgattgtctcggaccgagacccccgcttcacgggcaacttctggagcgcggtctttgcggtgcttggcaccaagctggacatgtcctcggcggaccattcgcagaccgatggtcagaccgagcgcgttaatcgcgtcgtcgaggacgtgctccgcagcatttgcgccgagacgccgaagcgccatgttgccactcgttgagtttgtgttgaacaacgccgtgcacgcctcaacaggctacacgccgttctacgtgaacagtttgtctcatcccgcgtcccactgacgccgccacgtggtggcctcgggcttgatgggggaggggggggggtcgatttagctgatcggctagccgatatcagcccagctactgttcgtaaacaggttgacgctttcttgtcgacgcgtctgagtgtcttgcgacatatccgtgacgcgatggctgagagccaagataagcaaaacgaacatgcagatgccaggggcagaagcaatgttgaaagttatgaggtcggtgacctggtgctgcttaatgctagaaacctacctacagatgcagtgtcagccgtctttaagacaaagttgctcccgcgcttcatcggacctttcaaggttgtggccaagaagggccttgcgtacacgctcaatcttccgagaaagatgcggacgcaccccgtcttctacatgggcttgctcaagccgtaccaggacccgatgcaggtgcggatggaggcaccgagggtgaccaggtcacaggcgcggaggtcgcggtcgtcgaggacgcagtcgcaggcgccgaagacgcgaccatcgacgcgggcaccgcaggtacaggcggaagggtcgacgccggaggtgccgcacgcacagggcccacagccgaaggtgcacaagaggcgcagcaaccggcgcgcgaggcgcagcaaccggcgcgcgaggcgcagcaaccggcgcgcgaggcgcagcaggcggggcctgcatgcgggccaggagttcgatctggcctttaagtacagcctgatcacgctgtagaaccaagaactctcgagcgtgtcgctcttcgcgatcgcgaaagtagttccccacccgttcagacggacgaagccccccccaaggttccaagccggtcccagacctcgcgaggtacaccaggcccatccacccgctccgcgagctcgtcgagaccagtcgcacaacgtgtcagacgcgcgtcgatgtcgtggacgtggtcccgaaggcggatcgcctgctgtcgcgtctcaaggtgctcacctttagtcgcaacgggccccacaccggttctgctcgatgaccatggggatctgcattaccatgtggagcgcctcctggcaaagcggcggtgccggggtcaaaaccagtatctggtgaaatggcgagggtaccctcactccgacaactcatgggagtttgaggtgtccctccgccaagactgcccagacgtcgtgaacgcttttgatcggcttgatcaccagcgccccatgggatcaaggccggcacgccggccgtcccgcgcttcccggcaataagctggtgggtcagccacattgctccgaggctgaccctgagccacagcgctcactcccttgcggagaggagcgcctggagtgctcgaaggagcgaagcgtgcagcgctaaactggggctgcggttgggagatcgccgaaaggctgcgcatggctcggaccttcgcgaatgcgaagcggagcttacgttcgatacgaacatccacttcgctgaagctggctgtgacgaggtcggtgaaaccttttacgcccaggtgtatagcggtagcccagaaaggtgttacgagtaaaccgttttggggaggtaaactctaaacgcagatttccttgaacgcaggttctggggaaaatgcggccagggtggcgtggcaccttatgaatccctatcggtgtcgtttatcttcggggagcctggatcgatcaccaggtgagttgtctgtgtggttgaaagccttgagttcgccgagcataacgttcacttgtctgaacgcacttctcccaaatggctgaagttcgaaaagtgggtgaagaatcagggttactaccacgagttagaaccccagaaatacacaccactttcaggtaaccaatacaaatgcagacttatgcacaaatacacagccgctagttgttcttagaccctcggccggtgggacgtataccagtcaactaatctgcgatcaaggtactggtcaaccttgaacgcactttcatacgcgcaccaccctcagataagggaaatatacagaccaaatgcaatccgatcctaaacgcagtcaatcaaactattcccgggggcgactgctaccgaaccacccgagatatcaatcgttaacataaaatgggacaccaccctcacctccatgcagggcccagctgggaaatggaatacgtggatcacttcagcagccggagcaaactgatccccacgtaactggatttgaatgtgtgtggagagctccgcactgcccttgtccttaaagacagcggacccgatccctcgacgacttgcgcagtagggggtaaaacgaactctctgattgttatctgctagactatcgctaggctttgtgtaaagatatctctctcgtagcgttcttctgtgttattcgccacgcgtctggtgaatatcttgactttagtatactggaacggttgaattagacactttctaccggattcttccccagctctaacccgtgtctttgtgcatgactggcttttgggaaaccttggccgcatgcgaccaaggttcccttgaacccgcatccttgaaaccgggtttcagagtcggcaggcctgaacgcagtgcgtccaaggtctgcggccaaaggcaacttgtgcccaaggctgaaaccatacccaagtcattgtggccaagggtaggttgactcttcacttagtcgtggggcacttggcgggacttcttccgggtggtcagcggtctggacaccatggacacgacttcactggggtggctgagctccgggtacacgaattctatgtgcgttcagggcgaggcgggacaccatacacgatacgttcgtgcaggtgtttttgacggcctcaatgtgtcaacccgcttaaggacgggggcggcctggacggatcgagtgcattcagggtttctcgtctgaacgcagacttccaggcctgaagggtccatcctaggcttgagcgcacttcgctccgcggaacacagccgattctcagctcagatcgtgtcgctcggtgcgcagccgggtccgggttcagtcttggccaatccgaatgtcggattcagtcgggtcagtagacaggtgatgaccagttgaggcaaaacctcgttcagtctcgtcacatggctcggagagcttccatggagctgagcttccggctgttctcgcccagcgttcaaactgagcgtcgtactcgatcgagtcctctctcgggttgagtgccaccgggtgcgtccgcatggcgggcacggacttttgctgggtttgcagccgaaaccgctcgcgatactccgcgacagtcgtaggctgtggagtgaggagtcgctgtcgcagagacgtacccagtgcgagctcctccggagtacgggccgcgggcccaatcgggtccagcgcgagggaccgctggccggaagccatagtcggcaacgctggggttcagcagagaccacagttcagggcgctgggagtgcatgggagccgtctgcgccgcgacctgctcggactgagcttcttccaagcggttggagacgacagggcccaggggcccgtcttcaccacgaggcggtgaatatcgtggctcagtgagcgcgcgcatctcgtagagaccagaggagcgttgagggaacggattcggagtcctcagcggtggtcgcggctccaccctcggcggcgcagcgcgctctgcaggaggacggctcggcgggcgcacaggagccgtgagcgcggggcggtctggatcgcgacggctcggagagcgaactgggaccggcgcgtcccattcacgacgcgtcggggatgtgggtgaagcgtcgccgcgactcggggagcgtcacgtgagtggggacgcatctcctcatctcctcggtttggagaaccctccatggactcgtccacctcgccctcttcaccaaagagttccctaggatccatgatctggtggtttggtgctcgaggacagctggggcttgcgcgctgcgagctgcgcttcaggcgttgcgccgtgaagtactcggacaccgagagcctggaaggcgtcgagggtgtgcgcgcgggcgctggcgttcgcggaggtgcggaggcacgcagtgcagcagcacgagagggacgaggttccgaggcgggtctcgcgaggggctgtctgcggtcgaaagtccaaaaggctttatgacttgaagtcacgtgagggcacgttgcgccgagaagttctcagacaagtccacgcgacgtggattgacttgttcgagaaggaggcttgacggaacaagacccggtggttgaccgttcagcgtgaacacccgtgtccacggtttggtgggggagggtgtaacggggttacacgagagttacctgaagggttgcgaagtgggtacacactgtctaacctaaatcagtgagagatccagcacatggcttcagagccactaatggtgcatatgacttgggttcactatgctagatagtgaaccggatacatttacaccgtaggcggcttggccgcgctaaagagaaataccgtataatcgtagtcctaagggtcaccccttaaacaaatttgcaaatcctaggcatcatcatattagagcaaatcacattttaatcttgaacagtactgcgatttagctcatcgaccgagctccaaaagaagaagtgaacttcgtgcgtatcgagagtagcaatggaggagatcgaaagctgtgagccggcgcacgaccctgcaggtgaattcgggggaggaggatactcaactgtttcttgctgtcttgataacgtacttacaatctagcgggtgccgccgctcgcacctgcgttccaccagtatatgtgaaggacgactgccgttgttcagatagatgatcatggtcaggcacgtacagcgtccacgcgggcgtcgaaaatggtgaagatatagggtcccggaatgccttatcattcctggcgtccgcgtgaccgtgcccatgtacttatttagagcggatacgttgaagccgatcatgcttacattttttagcttgtcgaacaacttgccttggctgtgtcgaccacgttgaacacctcgcagtactacgcgccaatattgataaacgagttgaacacttcgtcgactaggggttggccaggccagcctgataccgtgcgtcacgggcacgccgagctcggccgggataaggacctgctgccaggctcgaagaccttaacgttctaggccttccttcgatctgcgagtttgctgccactcgtaggcttggtcagcagcctacaggtttgcggaacttgccggcccgcacgcctgcgtcgacggttcgagctcctgtgtccagtggcccacactcctagttatacctctttttagcacaacaaaaaccttaaaatagcgatgcagtaatttgccacctgtttcggaatacacgtcactcgttggctactgactaactgacccttagaactatacgacgcttaggactacgcgtatacggtacatgcggtttgagattcacacagttaagagttaagggttgactcctggagtccgtacggtgtacggactcgtacgttctggttacgggctatcttaagctgatactgtgagtcggttaccacgcaatacgtcttgccgagatcttcccgaatccaccctcttttctcaatttaagttggaattgaaaatctttttcaaaactgggggattgattatcaagggtgcacgactattagggagtttcaatgtgagcatcgatgaggattattgtttggcaacaatgaggatttgccctggccaaagatgcgtctcgggagacgcatcgttttggctgattcttcaccgggcacatttgttgcgtccgtttatctcctcggatcgatcaccttgggagtgccctcattaccgggccgatatacaaaaaggaagtgagggtctaatgcactacgtgtactcaaacgatagaggaaattcagggcgatctagccatggtttcagcaagcccattgagaggtttggtgctgaagaagaagagcgcaaacatcaccattttgtcaaggaggcccggtcgggaggctatgagtgacaccagattttgagtgaagtttcaaatctgccagggtggatttgcacgcacatagccccgactaaacttgatagaaaaataatcctcattaatggttacattaaaaaaccctgttgaggtcgcaggaccaattagggtgaagctgtagggacagccaaattatatacgcacccaacaaatcaatagtttaaaccaatggttgtgcttttggtgtcaaaccgctgctcacgcttcgtctaaaatcgatagaaatcagatgcaacaatcagaattgtaaaaatatccgttgatttgcagtggacgaaaaagcaattgtggtcgggtcaaaattataacgacactcgataaggtgtcggtaagattggtagctaacttatggaaggccgtttctcgggtaataaatgagaccgtgtcaaacaaaaggggaacttgtgtttttggtccgttattttaaaataattccgaatcggatccgtacttttcgaatcaaacgttcatttcgttttttaagcctaggtaccctgtatccaaagtgtaccctgtacctatttcacatctattaccatcggtaccatgtagaccaattgcaaatcttacggtcccttttttcttaatgcacttaaaaagtcatgttcaatgctaaaacaataattgtttatgcacaagataagatttcactgcttgcaaacaagtgataaaaagtttcttttatatttcagagaatataaccaacacactctatttttgattataaacgctaaaactagtttcagcgttaccgttttgcgctatactacaagtaaatacattaaacgcgttgaattacgtataagcatgccagaaaactgcatttaacattcgtacatgaatatgtagactggtaaaagtagtgtacaagaataagattttttaatgaagaaatcgttattgttgtagtcctacgttttgacgtattcatttcttaaacgactgtgttaagtgtttactttatataataaagcattttctacagtggaaatatacttaatatttcatgtctcgtggtacaactttagaacagggaagagtttgataacaggatccactttgggtacgctttttaattctaatgtatatcataaaaacgttcggttcgaacaaaatggacccgattcggaattattttaaaataacggacccaaaacacaacttcccccaaacaaaatcatgcttacgaaccattaggggtgtcagaattgacaaaaatcactccgaaatcgcatattatttgggtggcaaataacgtgttatttccgggtttggtcgagggcgtctcagaattcatgggggtacgactagtgattcttcgagtatgcccaagaccagcggccgccagatggtcattgccgaggtgatcgacctcctctcccttgcggtcctcgaagatgagcttgacgaagacgctggaggctcctctccgtttgatgactgggccgagtgcttttcggtggagtcgacggtagatgagctgcacgagattcttctacagctaccgtctcgacggtatatgactgcaagagttagccaagaagccacgagttcgcgaggcagtacttccttaaacctcgacgatgatgactttcgatagctgactcgcactaccagggagtcgtttgagctcatctccaacaagattaaggaccaccgcgtgtttcagaataacagcgaccaccctcaagtcccaatatggctgcggctagcggtcacactcgatcgtctaggtacgactgcaaatgggtcgtcattgggccgtacgacgaagatctgaggagttggcacgggtacgctagacgtctttacggctcgcattacgattgcgttgatcgacatgtccgatgaatacatcaagtggccgagtccagacgagcgaagccaaacagcgcgtcgaatgaggcgagaaggcttcccggggtgcgtcgggtttattgacgggacaacgttcccttttgtgcagaagccaggggttgatggccagtgcttttgtaatagaaagcatcggtacagcttaaatgggcaagttgtttgtgatgtccaccgtcgcatcatcgcattctacagcggatggcccggttcatgtgctgatagcactgtgtatcgcgagatggcgttgcccaattacggctacaagcgccagttctttagcgaaggctagtacttgttggccgactcggcctatcctgcggacaagacctacaacgcgttggttccgacgtacaagaaaaattaagccggcactgacaacgaggcctttaacatgtgcgggttgtcaatgagcacactattgccgttctcaagagtcgatggtcgtccctgagagagccgcgagtccagatcaagataaaaggagatatcgagcgagtgctgcgctggataaatgcctgtgtagtgctgcacaacctgctgatcgatatcgcagatgactggagttcgtctggagaagaatcgtcaagttctgatgaagacgacctggaatgggatgacgacgacacgtttccattccgcggcagactgaaagcgcattccctgacacggggtcgcgaggagggagttatccaatggtatcgaggcaagtaggaataagggtttcttctctacctaacacaatcgtagtagatgagatcagcagtagccatgtatacgtttttattgatggtgttgcacgacaagcaacggaaaaccttacgcaaaaataaataaatagcaatgcatcaaaacgatcccgaatcatccagcgctactaactctccaaacccagcgcaagcgggtccgtcggtcgccctaaacttggttatcttaaacttgaagaagctccttaatctcgctcggcgtcttgccttggatgatcagtgcatagaagacttggtgccgctccgttgctttgcgtgccttcgcttcctcttcgcatctgtcacaatctatctgcagctgttgcagcatggccgactttttctcggtccacttcttcttgttgaacttaagctgctcgcggagatagtcctgctgcacctcctgcttcttcaggctggcttccaggtgggcttctgcaagggacacgtttttctggtgcgccgaagttcttgtcttcttagatccgttcttttttgccgtcgtgccggactcgcagggcttccgcttagtgcaggatcgtttggtcatagtcgtccggcggcttgaagcttgttcagaaccgcatttgtcaaacccatcccggtctagcggagactcatatcgagagtttctctgaacttcgtgatgtatgtcctccaacggctctggagttgtgctccccctaggtgcggcgtccctcgtgcgtggatttgaggaataaatgttcagcccatgtcttggaacaccgagagcttgctttgcttgggtgggcccccgactttgggtttcttgtctgtcccatagatggccttgaagttgtcttcctttgaaatccagtccacgagtatcttgtagtcagccgcagtttgatgaaccttggagccatcagctgcgcctttgtgattccctgccatcccttgtacggcgttagcactgtaaacagcttagcagaagcaaaaacacgtactgttagcgtgaggcgaccgcccctttgtgttggcgcccggggccttgacgaggggcagagtgctttaagccacgaggagtgtgtcgggaaggggggatagagagagcggtaccaagtcttttgatgatgctgtcactgcaagggtaggcgacgccaggcccttttgcgatttttcctcttcagtgagaaaaagaagagtgagagggcgcgccctttggcggatcgcaccacctcgtcaaatgcacgtttcatttggaaatcacccacctccagaggtggagatttcaaaatggcgggaaatggaatgctatttcggcgcaaaataacatactatattgtgacgaaatcgcaagtcaagtttgacaattctgacacccactatttggaggttttgagataatcgcgtttgaattcgactaatcaaatttcgtacctaaccggacatcaaaaattaaaaagttaaaattactcgtagaaagcggaaaacactgcaattagcttgctgttagcaggacctttccggtaatgtacagcacgaaaataaattcgtagttcatataatgaactaccggtaaattgactaaccccagtcggggaggacaaaatcgtttttaacttgatttcagaaaacagttaccacaattttagtcctagacggaccgctaggacggacggtatactgtcccgtgaatttcggagttgacccaccatttttcttgtttgtcctagcaaagtgcccgactggggttaactgtaagcaactcgaaacgtatttttaggtgcgcaagtgtgtgaaaactagtggtaggtaactcggtttctaagattcagtggagacacttagcatttgtatgctagtagtagtagaagcgatgtgtttgaaaccccctatcagggggtttcaaagtaggattttgccaaacattgccctgaagacatgaaaatttccagacttcctgattggctgtttcaaaagttactttgaacccccttttcccgagctcgacaagtcagcaagcaaacataagccccgaagcggctgtgcagttccgccaagtgtacgaaggtcaagtcgagcacctgcaaccaggccaagtgcaagtccacaacagtacaagacgagcgacgttgtctagggtaagtacaaatgcactggcgtcgtgattcaggccaacaggagacacgagcgcgtcgagggcaagtacgcgtggcaacacataaagcagaagaaggtcaaggtcagcaacagcagcttctgcatcaagtctagcaccagccgtgaggcttggaccaagctcagcggccggacggatattggctgcaccagcgcggcgtgccatctttcacgcagccaacgcgcattggtgtgtgcttgacgctatgggcgctagcgctggagccgcagttggcgccttcgcggggcgcgcgctactggcggaataggcctttgagatggctagattagtcgtcgcaataggctcttaggtcgtttggactcgattttggcgtcagtaaaacatgacataacggcaaaaccgcagcgcgatctgattggctgaaaagctgtttatgttcttgtgtctataggctcagcccaactttgaaaccccctaatgtggagaggcctagaaatgtacttaagtatgttgagtctgtagtagtattttccaagctgccactcgcacctttcgtttcattcatacaaagcaagacaatctacttctctgtcccacgaatttatgggtatttgaatttggtgtacacaacactaacgtgttaataccatcgtattggtcaaaattaatcgaggttaaacttaatatttcgattgtaaaatggatggttacagacgctaatttgctaccacaactccatttgctccgaagctgtcaagtaccagtccgacgcccttcatcatgcctcgcacaaccggcgccacggccatctcgcccgagactcgtgttgcggtggcggttttccttactactcttagtagggaaggccgcctccgccatggcacaattgcccgcgccaagcagctctttaggctgagtcgcacggcgatcaaagggatttggagcctccgtgacgacccagccgcgctggtcatgcctcgcaaggcgtacccccctcgcgcaacccggctcagcgccgaggaagttgccgagcgcgtcgcggcagtgccgctctgtcagcggcagacgctgcgcgctttagaagctgcctcaggaatcccaagatcgacactacagcggcatttgaatcgcaaggtacaacgccgcttcatttgcagggtcaagccagcgctctcggactcgcataagctggagaggttgacgtgggctctggcacacgtacatcgcccgattggtacgcattcttttgtatttatcctaattaatggaaatgtttaaaaactaatttattccattaggtcggaatttgtatcgttttcattctatgtatgatgtagttcatattgatgaaaaatggttaaatatgtacaagacttcatcgctactcaaggataaagtgtttccagcaatccgtgaaaaatgaccgggtaagttttttttctaggggtatttgacttggatattattaacgacttgtatgatttattttaggtcggaaaactacggttgtaagagtgcaacaagacaacgctgggccccatgtagacgaaaaccacggcgaggtggtggatgctggacgcgaacaaggctggaagataaacatggtttgccaaccgcctcgttcccccgattgtattttggatttgggtatttttaattgtatccagtctatccagtaccggcagcctacgaaccagatcgacggtcttattgacgcagtagagagtgcctttgatagtgttcaatatcagaccatcgaaaaatgcttcctcaccttacaaaaggtgatggaatgcattatcattgacgaggggggaaacaatttcaaactccctcgcctgcgcaaggtgctcaacggtggtgttaatacctccatgactgtggcatgtgacgttgtcgaaaatggctacaaagttctcacgtcacagattcttaatcaataaacatctggtttcgaatatttcctaatctgtgtgagtttattggtaaatccgtatttaaatctgtactgaatggtgattggctgtaataccacttgatatgatgcatttcgttctaacgaggaatagaacctcagcttattcaaagctcaattattgtgctttgcacgaactttggcatgcgattaagggctctaaaccaacgagcaaatccttcccggtgatcatatctcgcagcctaactctaagttaaagttaagctaatcaactgccagtaccaagcacaacgcagagcaaggacggagcggttgccactgcaagaataaatcggttgtcgctgcaagaaaacaaactgataaggtccccgatagaatggcgccaactccttgcgtaatagtaagcaccgatttcggcggggacgttttctttcgctctcttcgtcgtggccttgcgcgttaaaccaagctcgaatttcagagcacgacatatagtagcagtataaaattgctactaagaaatgtttggtagtgcaggaaacgctgactttaaagctgcttgcagctcctcgatataaaaacaggaatgttcttcaatattgtagacgtagtttaatgcgatagatcgccaacgcatgttaatcatcggctagaaagcaatcaaacaaagcgagcgagttagaattagaatgtcagggccgtagtattgtcggatttactccagccattcaacgaaagtgagcataactcaacgttaactcgttgtcttagcagctattctatcttaaatcgacgagttagcctcctaactcaatgatgggctaatcaccgtgatttgctaaaacaacgaattacgtcgttgtttagacagagagcatgcaaggcacaatactagtcttgggcgtattttcaggtagatttgctttgtcgccagtggctttacatcataatcgatgctctgtaaaagtccggttaattatcgctaaatatgagcagagttacgacataaaatggttttgacatcgaattcgggcccgcgagcccgttgttatttgatcagtcactcatgttaacaaactttaaaaaatacacgggaacgcgcaacagcataagctttacggcaagggtgcgtctctaaattcgatgtgtgcgctaagtaacaacggaaaatgctaactacccataaattcgtgggacagagaagtaaaaagcaaaatgtcatgactcggtcatgacgcagtgacctgatatccggggataacagccgcttttttgcgtgttacctcgagataccagttggtgggtcatgacccaaatactacgatttgattggcagtattaattacaaatttggggcgaaccttctccgagcgccattaacacatctcatggttgccattgcccgtcgctcgtaccccgtgccgtcgggcatcttggcgctcgagtgcccgcgtctgcccaccctgcctgtcgagcaccctgcccgccgagcacgctgcctgccgagcacgcgtcggtacgtactgttggtcgtcgtgaacatggtcatcgtacacacgacgccgctaattgtgactctgtggtggtggctctagtagcaggtcatgcacatctagggcagctactacgatatttggagcactacaacgcctacagggtgacgctgagcctcgtcgtcagcatgacggtacctttgtgaggatccccttcttcctgttgctcaagacgtgctgtgcgcagcggcacgatctgggtatggccatcgagcactgcagctctgttggcatcttcatacccgaccagtcgagcaaccgcactatggagctacaagacgcgtgttgaaggcagcgatatgtgcgcgctcatcatcgctttcatatcgggactgaaacgagttatggcaactaatttaatgatgtaaatgttggtattgcagttcagataatgaggtcaattagactgtcgaatgcattacactgatgatgtaagtcatcgtgctgtttgctgcgaagccattttgaataactgtcgatgctcttgttccccctctcagtatcagctctttcaatcgcatcgtcgacatagagaccgccattcacgaagctacgtacgtgattgatgacacatcgacgcctggaaaagaatttcgcttcttttgatgacgctctccattttgtgccaaatgtttcctccaggtattcgatcgaaggctgactagccaggccatggtgccactctgtccaaagctctcgtacggttgaaactcgtcggctcatgttgtactggggaactgtgactggttctaactgaggtgaatgttgctgtagcgtcgcgtttaccgaggttgacacaggagtgctgtcacgtagaggaagctggcttggatcagctccagctgcgttgttagataagggaagaagtcggtaaaggacgtcaccgtggagaaatgaagcaagctgatcttgggattgcttcaccatgtcaacgagagccaagtgctgagattctaaccgctgcatagttgctgcgtgctgcgtactaatttgttgctacaggactggcatggcaagctgaagctgcatttccaccgggtgctgcgtcgcctgagcgctagcaagtgcttgagcgcggaattgttgaaacggtccaccgaagatcggatggcggcgaagtcgagcaggaaggacgtcaactaaaatgcagcgtcttgaagcaacacggtgcgtaagaattccaacaattcaatgaaccctcgagcggcgaggttgcattcccactcaccatctaatagcttctgtttgttactttcaagcccagggaaaatctgttgcttgaggccattgggtgggtccacaatggcgcgttccaaataataaagacgtgcgcgtgggggggtgtcctgacagagcacgaatcgcttctcgcgccagaggagcggaatatactgcttccacggtgtaaaggccccatcggccatgtcggcgagtttgggagatgtcgacatcaccgccttccagttgtcgtacgccctgttggcggttgatatgagtctttttattgaacgtaaggccgaggtgatcaaaaacagtctcgtagcttttcttgtgagtgttgtaggatatagtttaatttcgatctcggccacttaggaacttgatgtcataccagtcctccgatctccgaaaggagggaaatggttcactattgagatgaaagcgctcaaacaagtagaaagcaaccgctccaacagggcataaatgaacagccttattgcgcatgaagccgacatgctgacgttttccaaacgtattcgttttcccatgttggattagcaggaccaacgaaatgcactgctgaaaaccctccttgtcaagttcctgggaaaacatatcagccagctccagatcac
